(19) United States
(12) Patent Application Publication
(10) Pub. No.: US 2022/0160791 A1
(43) Pub. Date: May 26, 2022

(54) COMPOSITIONS AND METHODS FOR NUCLEIC ACID EXPRESSION AND PROTEIN SECRETION IN BACTEROIDES

(71) Applicant: The Board of Trustees of the Leland Stanford Junior University, Stanford, CA (US)

(72) Inventors: Justin L. Sonnenburg, Redwood City, CA (US); Weston R. Whitaker, Daly City, CA (US); Elizabeth Stanley, Portola Valley, CA (US)

(21) Appl. No.: 16/094,694

(22) PCT Filed: Apr. 18, 2017
(86) PCT No.: PCT/US2017/028066

§ 371 Date: Oct. 18, 2018

Related U.S. Application Data
(60) Provisional application No. 62/325,379, filed on Apr. 20, 2016.

(51) Int. Cl. A61K 35/74; C12N 15/70; C12N 15/74; C12N 15/90; C12N 15/52; C12N 9/02; C07K 14/195

(52) U.S. Cl. CPC A61K 35/74; C12N 15/70; C12N 15/74; C12N 15/90; C12N 15/52; A61K 38/00; C12Y 113/12005; C07K 14/195; C12N 2795/10043; C07K 2319/00; C12N 9/0069

(57) ABSTRACT

Provided are nucleic acids that include a promoter, where the promoter is operable in a Bacteroides cell and is operably linked to a heterologous nucleotide sequence of interest. Also provided are nucleic acids that include a promoter (operable in a prokaryotic cell such as a Bacteroides cell) operably linked to a sequence encoding a synthetic ribosomal binding site (RBS). Also provided are fusion proteins (and nucleic acids encoding them) in which a secreted Bacteroides polypeptide is fused to a heterologous polypeptide of interest. Also provided are prokaryotic cells (e.g., E. coli, a Bacteroides cell, and the like) that include one more nucleic acids such as those described above. Also provided are methods of expression in a prokaryotic cell, methods of detectably labeling a Bacteroides cell in an animal's gut, and methods of delivering a protein to an individual's gut.

### CROSS-REFERENCE

[0001] This application is a National Stage Entry of International Application No. PCT/US2017/028066, filed Apr. 18, 2017, which application claims the benefit of U.S. Provisional Application No. 62/325,379, filed Apr. 20, 2016, each of which application is incorporated herein by reference.

### GOVERNMENT RIGHTS

[0002] This invention was made with Government support under contracts OD006515 and DK085025 awarded by the National Institutes of Health. The Government has certain rights in the invention.

### INCORPORATION BY REFERENCE OF SEQUENCE LISTING PROVIDED AS A TEXT FILE

[0003] A Sequence Listing is provided herewith as a text file “STAN-1296_Seglist_ST25_replacement.txt” created on Mar. 12, 2020 and having a size of 601 KB. The contents of the text file are incorporated by reference herein in their entirety.

### INTRODUCTION

[0004] The human gastrointestinal tract is a highly evolved human-microbial interface in which resident microbes are continually sensing and responding to numerous biochemical cues. In addition to their native role in digestion, immune function, metabolism, and the nervous system, gut-resident bacteria have untapped potential to be engineered to conduct specific tasks, record events, and make decisions. Such technology would benefit greatly from the development of genetic tools for manipulating members of the microbiota. Creation and implementation of such a toolkit would vastly expand the array of questions about the gut microbiota that can be experimentally addressed, and provide a foundation for engineering diagnostic or therapeutic microbes. There is a need in the art for genetic tools for abundant gut bacterial species.

[0005] While great advances have been made with genetic manipulation of proteobacteria, particularly E. coli, this taxon is typically not a prominent component of the healthy human adult microbiota. The Bacteroides, the most abundant genus within the US American gut, are capable of utilizing both dietary and host-derived nutrient sources, and are known to have an important role in immune development. Although some tools are available for genetic manipulation and expression in Bacteroides, the strongest promoters identified to date are insufficient, e.g., for microscopic imaging of fluorescent protein expression.

[0006] There is a need in the art for compositions and methods for reliable nucleic acid expression (generation of RNA and protein from DNA) in prokaryotes (e.g., Bacteroides). The present disclosure provides such methods and compositions (e.g., nucleic acids, expression vectors).

### SUMMARY

[0007] Compositions and methods are provided for the expression of nucleic acids. For example, provided are nucleic acids that include a promoter operably linked to a heterologous nucleotide sequence of interest (e.g., an insertion sequence such as a multiple cloning site, a heterologous nucleic acid sequence, such as a transgene, e.g., a selectable marker, a reporter, a therapeutic polypeptide, and the like), where the promoter is operable in a Bacteroides cell. Also provided are nucleic acids that includes a promoter (operable in a prokaryotic cell such as a Bacteroides cell) operably linked to: (i) a sequence encoding a synthetic ribosomal binding site (RBS) and (ii) nucleotide sequence of interest. Also provided are fusion proteins (and nucleic acids encoding them) in which a secreted Bacteroides polypeptide is fused to a heterologous polypeptide of interest. Also provided are prokaryotic cells (e.g., E. coli, a Bacteroides cell, and the like) that include nucleic acids such as those described above.

[0008] Provided are methods of expressing a transgene in a prokaryotic cell (e.g., using a subject nucleic acid), methods of detectably labeling a Bacteroides cell in an animal's gut (e.g., labeling Bacteroides cells that are distinguishable from one another), and methods of delivering a protein to an individual's gut, where such methods can be employed as methods of treatment.

### BRIEF DESCRIPTION OF THE DRAWINGS

[0009] The invention is best understood from the following detailed description when read in conjunction with the accompanying drawings. The patent or application file contains at least one drawing executed in color. Copies of this patent or patent application publication with color drawing(s) will be provided by the Office upon request and payment of the necessary fee. It is emphasized that, according to common practice, the various features of the drawings are not to-scale. On the contrary, the dimensions of the various features are arbitrarily expanded or reduced for clarity. Included in the drawings are the following figures.

[0010] FIG. 1: Schematic of the high-throughput cloning and genomic integration pipeline for Bacteroides using 96-well compatible liquid handling steps. The pipeline was applied to 54 specifically designed genomically integrated cassettes across four Bacteroides species, resulting in more than 99% correct plasmid assembly.

[0011] FIG. 2a-2f. Identification of a phage promoter capable of high protein expression. (FIG. 2a) Native Bt promoters expected to give high protein expression from literature (P_{rRNA} and P_{BT1311}) and transcriptomics data (P_{BT1830} and P_{BT4615}) were compared to a phage promoter (P_{BfP1E6}) (SEQ ID NO: 8) via fluorescence from GFP expression. The RBS used was either the strongest RBS experimentally identified from a 192 member RBS library for each promoter (black bars) or the strongest RBS from the P_{BfP1E6} RBS library (grey bars). (FIG. 2b) Fitness of the high expression Bt strain, with P_{BfP1E6} driven GFP, was tested in competition against a non-expressing strain showing only a minor fitness defect and stable colonization over a 10-week period in gnotobiotic mice. (FIG. 2c) The bi-colonized mouse from FIG. 2b with the median ratio of expressing and non-expressing strains was selected. Imaging of the distal colon demonstrates that the endogenous fluorescence from the GFP expressing portion of the population was sufficient for detection in vivo. Host tissue (lower left) was bordered by phalloidin stain of actin (red), and luminal contents contained both expressing (green) and non-expressing (white; DAPI only) Bt. (FIG. 2d) The fluorescence of 214 Bt strains, each containing a mutation in the P_{BfP1E6} promoter was compared to the P_{BfP1E6} level. The x-axis represents the position of each mutation and diamonds, circles, triangles and squares represent a mutation to the residue A, C, G or T, respectively, with the average mutant value at each position traced in grey. The previously characterized −7 and −33 motifs are highlighted in blue and the putative UP-element motifs revealed here are highlighted in red. (FIG. 2e) Constitutive promoters derived from P_{BfP1E6} were compared via luciferase expression dependent luminescence relative to P_{BfP1E6}. (FIG. 2f) Different RBSs under P_{BfP1E6}-driven luciferase were compared. RBS1 (sr1) was rationally designed for weak expression and RBS2-8 (sr2-8) were selected from the A/T rich RBS library. Error bars represent the 95% confidence interval for replicates of at least 3 independent experiments (FIG. 2a, FIG. 2d, FIG. 2e, FIG. 2f) or 5 different mice (FIG. 2b).

[0012] FIG. 3a-3f. Phage promoter set can predictably tune protein expression across the Bacteroides genus, allowing simultaneous strain identification in vivo. (FIG. 3a) Luminescence was measured from 56 promoter-RBS combinations (all possible FIG. 2e-f combinations, excluding the weakest promoter) driving luciferase expression in each of four species: Bt, Bv, Bo and Bu. Measured luminescence is plotted against expected luminescence calculated by multiplying relative promoter and RBS strengths in Bt (FIG. 2e-f). Individual strains measurements, a linear fit of log₁₀ values, and associated R² are colored by species: Bt (blue), Bv (red), Bo (green) and Bu (purple). (FIG. 3b) A unique combination of one of three GFP expression levels or two mCherry expression levels were encoded in each of six Bacteroides species. Independently measured single-cell fluorescence profiles representing 95% of the cells for each species, as determined by microscopy of mid-log cultures, are plotted with the associated species label. (FIG. 3c) The single-cell fluorescence profile from imaging the six member community in the distal colon is shown. (FIG. 3d) A representative transformed image of the six-member community within the distal colon is shown. Each pixel was independently transformed to better display log-separated GFP intensity and showed clearly distinguished cells for all six species (blue Be; cyan Bo; green Bt; red Bf, orange Bu; yellow Bv). Pixels near transformation thresholds are colored in grey, few ambiguous cells are present. (FIG. 30) A larger transformed image, used for FIG. 3d, shows the six Bacteroides species localization relative to host nuclei (blue near bottom of image), actin-delineated epithelial boundary (white) and mucus (purple). The smaller image in FIG. 3d is outlined with a dashed white box. (FIG. 3f) An image from the six member community shows more clonal Bacteroides population distributions within ingested plant material (plant cell walls in purple) in the distal colon. Bo (cyan) predominates in this image, while populations of Bt, Bu and By can also be seen.

[0013] FIG. 4. Golden Gate assembly schematic for pNBU2 based plasmids. The junctions used in BsaI assembly of expression cassettes are capitalized. The split ampicillin resistance gene only functions when reassembled, thus eliminating carry through of undigested parts. BsmBI can be subsequently used for assembling multi-cassettes integration plasmids.

[0014] FIG. 5a-5b. Comparison of three GFP expression distributions across strains generated using different RBS libraries. (FIG. 5a) Bt strains with GFP expression driven by P_{rRNA} with RBS sequences from one of three different RBS libraries: an A/G-rich degenerate sequence, N₁₁R₇N₂cgtaaATG (SEQ ID NO: 373), an unbiased degenerate sequence, N₂₀cgtaaATG (SEQ ID NO: 374), and an A/T-rich sequence N₉W₃A₃W₂tWaNaataATG (SEQ ID NO: 375). For each library 192 colonies were screened for GFP fluorescence. Most readings were close to background autofluorescence, 1 au. The fluorescence readings from the strains of the A/T-rich RBS library was significantly higher than from the strains of the A/G-rich or unbiased degenerate RBS libraries, (P=2×10⁻¹⁴ and 4×10⁻⁹, respectively, Student's t-test). When repeated in triplicate, the highest expression strain from the A/T-rich library produced fluorescence at 1.4 au. (FIG. 5b) RBS libraries were generated similarly for P_{BT1763}-driven GFP expression and at least 72 colonies for each library were screened. Similar to PrRNA, the A/T-rich libraries produce a populations with higher fluorescent expression than the other two libraries (P<2×10⁻⁸). Additionally, the fluorescence readings from the strains of the A/G rich RBS library were significantly weaker than those of the unbiased degenerate RBS library (P=4×10⁻⁵).

[0015] FIG. 6. Influence of phage promoter length on protein expression. The phage promoter length, in base-pairs, used to drive GFP expression is indicated with positions relative to the translation start site. Error bars represent the 95% confidence interval from 3 biological replicates.

[0016] FIG. 7. P_{BfP1E6}-driven GFP fluorescence from a single genomic copy was visible by eye. A cell pellet from non-GFP expressing Bt (left) was compared to a pellet with Bt harboring a P_{BfP1E6}-driven GFP expression construct (right) suspended over a UV box. The image is unprocessed.

[0017] FIG. 8. In vitro fitness assay of GFP-expressing Bt. Bt with P_{BfP1E6}-driven GFP expression was mixed 1:1 with a non-expressing Bt strain, grown anaerobically in TYG medium and passaged twice per day at 1:50 and 1:100 dilution, giving a product of the dilutions of 1.6×10¹⁰ (˜33 doublings) at day 4. Each day duplicate cultures at mid-log phase were assayed for bulk fluorescence (relative to 100% GFP positive and negative cultures). Error bars represent the 95% confidence interval from 2 independent biological replicates.

[0018] FIG. 9a-9e. Demonstration of the method for quantifying GFP positive cells from FIG. 2b-2c. (FIG. 9a) A 203×203 μm confocal image was taken of a distal colon section with endogenous GFP fluorescence and staining with DAPI for host nuclei and bacteria (white) and phalloidin for the host epithelial boundary (red). Dietary material also fluoresces strongly in the DAPI channel and can be distinguished from bacteria by its large size. (FIG. 9b) In an expanded portion of FIG. 9a represented by the magenta dashed box, bacteria with only DAPI (white) or DAPI and GFP fluorescence can be seen. (FIG. 9c) In ImageJ (NIH), the deconvolved DAPI image is thresholded to generate a mask of individual objects of bacterial cell size. (FIG. 9d) The GFP channel is used to quantify the average fluorescent intensity for each object delineated in FIG. 9c. (FIG. 9e) A histogram of the fluorescence value of single cells demonstrates a large separation between non-fluorescing (black bars), most of which are below 1 au, and fluorescing (green bars) cells, most of which are above 20 au. Objects of ambiguous intensities (grey bars) make up about 4% of objects.

[0019] FIG. 10. Transcript abundance at various locations along the gut and in different growth phases in culture were compared for GFP driven by either P_{BfP1E6} or P_{rRNA}. RT-qPCR reading of promoter specific transcript amplification, GFP, was normalized by 16S rRNA specific (not overlapping with P_{rRNA}) transcript amplification. P_{BfP1E6} transcript measurements (left bars) varied by less than four-fold across all conditions, while P_{rRNA} measurements (right bars) varied by more than 40-fold. Error bars represent the 95% confidence interval from different mice or biological replicates.

[0020] FIG. 11a-11d. (FIG. 11a) The upstream region important for phage promoter function is conserved in native Bt promoters. For each gene in the Bt genome, a candidate promoter sequence was identified by the presence of the −7 conserved sequence, TAnnTTTGnnn (SEQ ID NO: 372), ending within 10 to 60 nucleotides of the start codon of the first gene in the operon (operons predicted by microbesonline.org). These criteria were met for 898 genes, which were entered into the WebLogo 3 (http) // (weblogo) dot (threeplusone) dot (com) sequence logo creation software to illustrate the information content of each residue. The −33 box reported to conserve the TTTG sequence is highlighted in blue and the upstream regions found to be important in the phage promoter mutational analysis are highlighted in red, with the sequence of the phage promoters aligned below the logo for reference. Despite the many misidentified putative promoters expected in this simple analysis, the −33 region did appear to be conserved in this dataset, and the −50 region appeared to be more highly conserved. (FIG. 11b) A standard curve of luminescence produced from purified NanoLuc (Promega) luciferase protein is shown for estimating the absolute protein concentrations. The linear fit to the log 10 values and the corresponding equation and R² is shown. (FIG. 11c) Luminescence produced by NanoLuc driven by the different phage promoters in FIG. 4B was measured concurrently with the standard curve and compared. Using measured CFUs (5×10⁶ CFU/μL) and other estimates (see methods) that corresponded to a ˜0.5% cytoplasmic fraction of saturated culture volume, the absolute cytoplasmic concentration of NanoLuc is estimated for each strain. (FIG. 11d) Relative expression from promoters P_BfP1E4, P_BfP5E4, P_BfP2E5, P_BfP4E5 and, P_BfP1E6 driving GFP (bottom line) or mCherry (top line) is compared to corresponding luciferase expression (dotted/center line).

[0021] FIG. 12. The phage promoter set produced GFP expression matching expectation from characterization with luciferase. The strongest 6 phage promoter variants from FIG. 2e drove GFP expression in Bt (blue), By (red), Bo (green), Bf (purple) and Be (orange). GFP expression, relative to P_{BfP1E6} in Bt, is plotted against luciferase expression relative to P_{BfP1E6} in Bt (FIG. 2e). A linear fit of log 10 values of the 5 strongest promoters, with the weakest promoter excluded due the high contribution of background auto-fluorescence (0.8%), gave an R² of 0.92.

[0022] FIG. 13a-13b. Distal colon image (from FIG. 3e) prior to processing and transformation. (FIG. 13a) A three-channel image of the field of view used for FIG. 3e, shows DAPI (blue), sfGFP (green), UEAI-Alexa488 for mucus (also in green), mCherry (red), and Phalloidin-Alexa594 for actin delineation of host epithelium (also in red). (FIG. 13b) Using linear unmixing on a Zeiss LSM 700 confocal microscope, the image was separated into 5 channels, DAPI (blue), sfGFP (green), UEAI-Alexa488 (cyan), mCherry (red), and Phalloidin-Alexa594 (purple), while the background autofluorescent material was largely eliminated. This 5-channel image was then transformed, to better visualize the log-separated GFP values, to give FIG. 3e.

[0023] FIG. 14a-14c. A control three-member community for estimating error. (FIG. 14a) A community of Bf, Bo and Bv was used to estimate error in identifying member of the six-member community from FIG. 3. The single-cell fluorescence profiles from independent culture for this community were plotted with the associated species label (similar to FIG. 3b). (FIG. 14b) A germ-free mouse was colonized with the three member community. An unprocessed image with high GFP gain, so that intermediate GFP levels can be visualized, from the distal colon is shown. (FIG. 14c) The single cell fluorescent values of individual cells from the previous image, (FIG. 14b), clustered as expected, but with larger deviations than seen in independent culture (FIG. 14a), due in part to difficulties in microscopy and image processing techniques associated with imaging gut sections. Thresholds used to determine species identity were used to quantify the number of cells that would be miscategorized (area in red) as the absent species (Bt, Bu and Be) giving a 5.9% error rate.

[0024] FIG. 15 depicts Table 1, which shows the percentage of correctly assembled, genomically integrated constructs for each species using the high-throughput cloning and conjugation protocol; and Table 2, which shows a list of oligonucleotides used for RBS libraries. Top to bottom in Table 2: (SEQ ID NOs: 365-370).

[0025] FIG. 16 depicts Table 3, which shows a list of plasmids that were used in the Examples section. The sequences for each listed construct are set forth as, from top to bottom, SEQ ID NOs: 94-148.

[0026] FIG. 17a-17d. Data related to diverse Bacteroides species engineered to secrete peptides into extracellular space. (FIG. 17a) B. thetaiotaomicron cell culture pellet and filter sterilized supernatant were analyzed via mass spectrometry proteomics and candidate secreted proteins were identified by abundance in the cell culture supernatant. (FIG. 17b) Protein product of BT0525 can direct a 6× His/3×FLAG peptide outside the cell in six divergent Bacteroides species. Western blot analysis of cell pellet (P) and culture supernatant (S) from mid-log cultures of Bacteroides species using a monoclonal anti-3× FLAG antibody. (FIG. 17c) Schematic of cargo peptides secreted via BT0525 using a designed cleavable linker system to allow for release into extracellular space. (FIG. 17d) Secreted cargo 6× His/3×FLAG peptide is released from carrier BT0525 upon addition of mouse cecal extract (CE) when fusion linker is designed to be targeted by gut proteases. Western blot of culture supernatant from B. thetaiotaomicron secreting fusion proteins with either a non-cleavable or cleavable linker, exposed to either PBS or CE, using anti-3×FLAG monoclonal antibody.

[0027] FIG. 18a-18b. B. thetaiotaomicron secreting anti-inflammatory peptides protect mice from DSS-induced colitis. (FIG. 18a) Gnotobiotic mice colonized with a model three-member community of Edwardsiella tarda, Clostridium scindens, and Bacteroides vulgatus were given 5% DSS in drinking water. Mice that also received B. theta secreting anti-inflammatory peptides lost significantly less weight than mice that were untreated. (FIG. 18b) Disease Activity Index at time of sacrifice was significantly lower in mice that received B. thetaiotaomicron secreting an effective anti-inflammatory protein than those receiving a tripeptide only.

[0028] FIG. 19 depicts amino acid sequences of proteins found (during work disclosed in the examples section herein) to be secreted from B. thetaiotaomicron cultures. The listed proteins are a non-limiting list of possible proteins that can be used as a secreted Bacteroides protein that is part of a subject secreted fusion protein (e.g., where a polypeptide of interest is fused to a secreted Bacteroides protein).

[0029] FIG. 20 depicts E. coli cells expressing a GFP transgene that is operably linked to the promoter of SEQ ID NO: 388 (which is demonstrated here to be operable in Bacteroides cells, and also in E. coli cells). S17-1 is a strain of E. coli used to conjugate plasmids over to Bacteroides cells.

[0030] FIG. 21 depicts a sequence alignment of the promoters of Table 6.

[0031] FIG. 22. Bt secretes proteins via OMVs. When secreted protein candidates were cloned under constitutive expression with a 3×FLAG tag and cell pellet (P), cell-free culture supernatant (S), ultracentrifuged S to remove OMVs (U), and recovered OMVs (O) were analyzed via western blot, protein products of BT1488 and BT3742 localized to OMVs (presence of BT3742 in the ultracentrifuged supernatant is accounted for by lysis) while BT0525 localized mainly to the cell-free supernatant.

[0032] FIG. 23 Diverse species of Bacteroides secrete BT0525. Western blot analysis of By, Bu, and Be strains expressing sfGFP and BT0525, each under P_{BfP1E6} and with a 3×FLAG tag. Cell pellets show expression of both proteins, while culture supernatants demonstrate secretion of BT0525 independent of lysis. These three species of Bacteroides are able to accumulate more BT0525 signal in the supernatant than Bt, Bf, or Bo for unknown reasons. This could be due to differential expression of secretion machinery, degradation machinery in the periplasm or at the cell membrane, or of proteases that are released extracellularly.

[0033] FIG. 24a-24f Colonization by Bt prevents crypt localization of an isogenic strain. (FIG. 24a) Fecal densities of sequentially introduced isogenic Bt strains with differing antibiotic resistance in conventional mice by selective plating (erm, top line; tet, bottom line). (FIG. 24b) Schematic for experiment in (FIG. 24C-FIG. 24F) in which germ-free mice are colonized with GFP- and RFP-expressing Bt strains either one week apart (bottom) or simultaneously (top). (FIG. 24c) The relative abundance of GFP expressing Bt, relative to the total (GFP plus RFP) Bt is quantified for lumen (grey bars) and crypt (black bars) for the co-colonized and sequentially colonized mice. Error bars represent the 95% confidence interval for mice (n=3) in each group (* P<0.05, ** P<0.01). (FIG. 24d) Image of luminal and crypt bacteria from co-colonized mouse proximal colon. The lumen-epithelium interface is represented by the dashed white line. Scale bar, 10 315 μm. (FIG. 24e) Representative crypt from simultaneous colonization. (FIG. 24f) Representative crypt from sequential colonization.

### DETAILED DESCRIPTION

[0034] Before the present methods and compositions are described, it is to be understood that this invention is not limited to particular method or composition described, as such may, of course, vary. It is also to be understood that the terminology used herein is for the purpose of describing particular embodiments only, and is not intended to be limiting, since the scope of the present invention will be limited only by the appended claims.

[0035] Where a range of values is provided, it is understood that each intervening value, to the tenth of the unit of the lower limit unless the context clearly dictates otherwise, between the upper and lower limits of that range is also specifically disclosed. Each smaller range between any stated value or intervening value in a stated range and any other stated or intervening value in that stated range is encompassed within the invention. The upper and lower limits of these smaller ranges may independently be included or excluded in the range, and each range where either, neither or both limits are included in the smaller ranges is also encompassed within the invention, subject to any specifically excluded limit in the stated range. Where the stated range includes one or both of the limits, ranges excluding either or both of those included limits are also included in the invention.

[0036] Unless defined otherwise, all technical and scientific terms used herein have the same meaning as commonly understood by one of ordinary skill in the art to which this invention belongs. Although any methods and materials similar or equivalent to those described herein can be used in the practice or testing of the present invention, some potential and preferred methods and materials are now described. All publications mentioned herein are incorporated herein by reference to disclose and describe the methods and/or materials in connection with which the publications are cited. It is understood that the present disclosure supercedes any disclosure of an incorporated publication to the extent there is a contradiction.

[0037] As will be apparent to those of skill in the art upon reading this disclosure, each of the individual embodiments described and illustrated herein has discrete components and features which may be readily separated from or combined with the features of any of the other several embodiments without departing from the scope or spirit of the present invention. Any recited method can be carried out in the order of events recited or in any other order which is logically possible.

[0038] It must be noted that as used herein and in the appended claims, the singular forms “a”, “an”, and “the” include plural referents unless the context clearly dictates otherwise. Thus, for example, reference to “a cell” includes a plurality of such cells (e.g., a population of such cells) and reference to “the protein” includes reference to one or more proteins and equivalents thereof, e.g. polypeptides, known to those skilled in the art, and so forth.

[0039] The publications discussed herein are provided solely for their disclosure prior to the filing date of the present application. Nothing herein is to be construed as an admission that the present invention is not entitled to antedate such publication by virtue of prior invention. Further, the dates of publication provided may be different from the actual publication dates which may need to be independently confirmed.

### Definitions

[0040] By a “DNA molecule” it is meant the polymeric form of deoxyribonucleotides (adenine, guanine, thymine, or cytosine) in either single stranded form or a double-stranded helix. This term refers only to the primary and secondary structure of the molecule, and does not limit it to any particular tertiary forms. Thus, this term includes double-stranded DNA found, inter alia, in linear DNA molecules (e.g., restriction fragments), viruses, plasmids, and chromosomes.

[0041] By a DNA “coding sequence” it is meant a DNA sequence which is transcribed and translated into a polypeptide when placed under the control of appropriate regulatory sequences. The boundaries of the coding sequence are determined by a start codon at the 5′ (amino) terminus and a translation stop codon at the 3′ (carboxyl) terminus. A transcription termination sequence may be located 3′ to the coding sequence.

[0042] “DNA regulatory sequences”, as used herein, are transcriptional and translational control sequences, such as promoters, terminators, Ribosome binding sites (RBSs), and the like, that provide for and/or regulate expression of a coding sequence in a host cell.

[0043] In some embodiments, a subject nucleotide sequence (e.g., a promoter sequence) is modified relative to a corresponding wild type sequence. A “corresponding wild type sequence” is the wild type (naturally occurring) sequence that has the highest identity with the sequence in question. Such a sequence will usually have a similar function as the sequence in question, but this is not necessarily the case. For example, a synthetic promoter sequence has at least one mutation relative to a corresponding wild type promoter sequence, and the corresponding wild type promoter sequence is the wild type promoter sequence most similar to the synthetic sequence. Likewise, a synthetic RBS sequence has at least one mutation relative to a corresponding wild type RBS sequence, and the corresponding wild type RBS sequence is the wild type RBS sequence most similar to the synthetic sequence. A “corresponding wild type sequence” (e.g., nucleotide sequence, amino acid sequence) can be identified at the nucleotide sequence level (and when the sequence codes for a protein, the encoded amino acid sequence can also be evaluated) using any convenient method (e.g., using any convenient sequence comparison/alignment software such as BLAST, etc.). Such methods will be known and readily available to one of ordinary skill in the art.

[0044] The terms “peptide,” “polypeptide,” and “protein” are used interchangeably herein, and refer to a polymeric form of amino acids of any length, which can include coded and non-coded amino acids, chemically or biochemically modified or derivatized amino acids, and polypeptides having modified peptide backbones.

[0045] The terms “host”, “host cell” and “recombinant host cell” are used interchangeably herein to indicate a prokaryotic cell into which one or more nucleic acids such as isolated and purified nucleic acids (e.g., vectors) have been introduced. It is understood that such terms refer not only to the particular subject cell but also to the progeny or potential progeny of such a cell. Because certain modifications may occur in succeeding generations due to either mutation or environmental influences, such progeny may not, in fact, be identical to the parent cell, but are still included within the scope of the term as used herein.

[0046] The term “isolated” and “purified nucleic acid” refers to the state in which a nucleic acid can be. In such a case, the nucleic acids will be free or substantially free of material with which they are naturally associated such as other nucleic acids with which they are found in their natural environment, or the environment in which they are prepared (e.g. cell culture).

[0047] The terms “transformation”, “transformed” or “introducing a nucleic acid into a host cell” denote any process wherein an extracellular nucleic acid like a vector, with or without accompanying material, enters a host cell (e.g., a prokaryotic cell, a Bacteroides cell, an E. coli cell, etc.). The term “cell transformed” or “transformed cell” means the cell or its progeny into which the extracellular nucleic acid has been introduced and thus includes the extracellular nucleic acid. The introduced nucleic acid may or may not be integrated (covalently linked) into the genome of the cell. For example, in some cases, the introduced nucleic acid integrates into the genome of the cell (as a chromosomal integrant). In some cases, the introduced nucleic acid is maintained on an episomal element (extra chromosomal element) such as a plasmid.

[0048] Any convenient method can be used to introduce a nucleic acid into a prokaryotic cell, e.g., by electroporation (e.g., using electro-competent cells), by conjugation, by chemical methods (e.g., using chemically competent cells), and the like.

[0049] The amino acids described herein are preferred to be in the “L” isomeric form. The amino acid sequences are given in one-letter code (A: alanine; C: cysteine; D: aspartic acid; E: glutamic acid; F: phenylalanine; G: glycine; H: histidine; I: isoleucine: K: lysine; L: leucine; M: methionine; N: asparagine; P: proline; Q: glutamine; R: arginine; S: serine; T: threonine; V: valine; W: tryptophan: Y: tyrosine; X: any residue). In keeping with standard polypeptide nomenclature, NH2 refers to the free amino group present at the amino terminus (the N terminus) of a polypeptide, while COOH refers to the free carboxy group present at the carboxy terminus (the C terminus) of a polypeptide.

[0050] General methods in molecular and cellular biochemistry can be found in such standard textbooks as Molecular Cloning: A Laboratory Manual, 3rd Ed. (Sambrook et al., HaRBor Laboratory Press 2001); Short Protocols in Molecular Biology, 4th Ed. (Ausubel et al. eds., John Wiley & Sons 1999); Protein Methods (Bollag et al., John Wiley & Sons 1996); Nonviral Vectors for Gene Therapy (Wagner et al. eds., Academic Press 1999); and Viral Vectors (Kaplift & Loewy eds., Academic Press 1995); the disclosures of which are incorporated herein by reference. Reagents, cloning vectors, and kits for genetic manipulation referred to in this disclosure are in many cases available from commercial vendors such as BioRad, Stratagene, Invitrogen, Sigma-Aldrich, and ClonTech.

### Compositions

[0051] Provided are nucleic acids (e.g., expression vectors) that include a promoter operably linked to a nucleotide sequence of interest. In some cases, a subject promoter is operable (functional) in a prokaryotic cell (e.g., a Bacteroides cell). Also provided are prokaryotic cells such as Bacteroides cells.

### Bacteroides Cells

[0052] The term “Bacteroides cell” is used herein to refer to a cell of the genus Bacteroides (e.g., when referencing cells in which a subject promoter is operable, in the context of a cell that includes a subject nucleic acid, in the context of a subject method, and the like). Likewise, the term “Bacteroides phage” refers to a phage that ‘infects’ a Bacteroides cell (i.e., a phage that infects a cell of the genus Bacteroides).

[0053] As such, in some cases, a subject cell is a Bacteroides cell. In some cases, a subject promoter is operable in a Bacteroides cell. In some cases, a subject promoter is (or is derived from) a Bacteroides phage promoter. In some cases, a subject cell (e.g., a cell of a subject method, a cell that includes a subject nucleic acid, a cell in which a subject promoter is operable, and the like) is a Bacteroides cell. Examples of species within the genus Bacteroides include but are not limited to: B. fragilis (Bt). B. distasonis (Bd), B. thetaiotaomicron (Bt), B. vulgatus (Bv), B. ovatus (Bo), B. eggerrthii (Be), B. merdae (Bm), B. stercoris (Bs), B. uniformis (Bu), and B. caccae (Bc).

[0054] In some cases, a subject Bacteroides cell (e.g., a cell of a subject method, a cell that includes a subject nucleic acid, a cell in which a subject promoter is operable, and the like) is a species selected from: B. fragilis (B), B. thetaiotaomicron (Bt), B. vulgatus (Bv), B. ovatus (Bo), and B. uniformis (Bu). In some cases, the Bacteroides cell is a species selected from: B. fragilis (B), B. distasonis (Bd), B. thetaiotaomicron (Bt), B. vulgatus (Bv), B. ovatus (Bo), B. eggerrthii (Be), B. merdae (Bm), B. stercoris (Bs), B. uniformis (Bu), and B. caccae (Bc). In some cases, the Bacteroides cell is a species selected from: B. fragilis (BO, B. thetaiotaomicron (Bt), B. vulgatus (Bv), B. ovatus (Bo), and B. uniformis (Bu). In some cases, the Bacteroides cell is a species selected from: B. thetaiotaomicron (Bt), B. vulgatus (Bv), B. ovatus (Bo), and B. uniformis (Bu).

### Promoter

[0055] As noted above, provided are nucleic acids (e.g., expression vectors) that include a promoter operably linked to a nucleotide sequence of interest. As used herein, a “promoter” or “promoter sequence” is a DNA regulatory region capable of recruiting RNA polymerase in a cell and initiating transcription of a downstream (3′ direction) sequence. Thus, a promoter is nucleic acid sequence sufficient to direct transcription of a nucleic acid sequence to which it is operably linked.

[0056] The promoter of a subject nucleic acid is operable in a Bacteroides cell. When a promoter is operable in a Bacteroides cell, the promoter is functional in a cell of the genus Bacteroides. Because some promoters can be operable in more than one type of cell, a phrase such as “operable in a Bacteroides cell” or “operable in Bacteroides cells” is not limiting in the sense that it does not mean that such a promoter is not operable in other cell types (i.e., it does not mean that the promoter is not functional in other prokaryotic cells). For example, a promoter that is operable in Bacteroides cells may also be operable in other types of prokaryotic cells (e.g., E. coli cells) (e.g., see FIG. 20). Thus, in some cases, a subject promoter, in addition to being operable in Bacteroides cells, is also operable in non-Bacteroides cells (e.g., prokaryotic cells such as E. coli cells).

[0057] In some cases, a subject promoter is operable in a Bacteroides cell (e.g., B. fragilis (B), B. distasonis (Bd), B. thetaiotaomicron (Bt), B. vulgatus (Bv), B. ovatus (Bo), B. eggerrthii (Be), B. merdae (Bm), B. stercoris (Bs), B. uniformis (Bu), B. caccae (Bc), and the like). In some cases, a subject promoter is operable in a Bacteroides cell selected from: B. fragilis (Bt), B. distasonis (Bd), B. thetaiotaomicron (Bt), B. vulgatus (Bv), B. ovatus (Bo), B. eggerrthii (Be), B. merdae (Bm), B. stercoris (Bs), B. uniformis (Bu), and B. caccae (Bc). In some cases, a subject promoter is operable in a Bacteroides cell selected from: B. fragilis (Bt), B. thetaiotaomicron (Bt), B. vulgatus (Bv), B. ovatus (Bo), and B. uniformis (Bu). In some cases, a subject promoter is operable in a Bacteroides cell selected from: B. thetaiotaomicron (Bt), B. vulgatus (Bv), B. ovatus (Bo), and B. uniformis (Bu). In some cases, a subject promoter is operable in prokaryotic cells (e.g., Bacteroides cells, E. coli, etc.). In some cases, a subject promoter is operable in E. coli.

[0058] In some embodiments, a promoter of a subject nucleic acid includes a nucleotide sequence of a wild type (i.e., naturally occurring) promoter from a phage (e.g., a Bacteroides phage, i.e., a phage that infects Bacteroides cells). For example, in some cases, a promoter of a subject nucleic acid includes the Bacteroides phage promoter sequence set forth in any of SEQ ID NOs: 8, 388-397, and 405-407. In some cases, a promoter of a subject nucleic acid includes the Bacteroides phage promoter sequence set forth in any of SEQ ID NOs: 388 and 407. In some cases, a promoter of a subject nucleic acid includes the Bacteroides phage promoter sequence set forth in SEQ ID NO: 8. In some cases, a promoter of a subject nucleic acid includes the Bacteroides phage promoter sequence set forth in SEQ ID NO: 388. In some cases, a promoter of a subject nucleic acid includes the Bacteroides phage promoter sequence set forth in SEQ ID NO: 406. In some cases, a promoter of a subject nucleic acid includes the Bacteroides phage promoter sequence set forth in SEQ ID NO: 407. In some cases, a promoter of a subject nucleic acid is a synthetic promoter (i.e., not naturally occurring, e.g., a sequence that has at least one mutation relative to a corresponding wild type promoter sequence).

[0059] As described below in the examples section, the inventors have isolated at least two wild type phage promoter sequences, performed mutagenesis and truncation experiments, and performed sequence alignments to identify positions within the promoter sequences that account for controlling expression of an operably linked nucleotide sequence of interest. For example, in some embodiments, a promoter of a subject nucleic acid includes the nucleotide sequence: GTTAA (n)ₓ₁ GTTAA (n)ₓ₂ TA (n)₂ TTTG (SEQ ID NO: 400), where:
[0060] (1) x1 can be an integer in a range of from 3-7 (e.g., in some cases x1 is an integer in a range of from 4-6, in some cases x1 is 4, and in some cases, x1 is 6); and
[0061] (2) x2 can be an integer in a range of from 36-38 (e.g., in some cases x2 is 37). In some cases, x1 is an integer in a range of from 3-7 and x2 is an integer in a range of from 36-38.
   In some cases, x1 is an integer in a range of from 4-6 and x2 is in integer in a range of from 36-38. In some cases, x1 is an integer in a range of from 3-7 and x2 is 37. In some cases, x1 is an integer in a range of from 4-6 and x2 is 37.

[0062] In some embodiments, a promoter of a subject nucleic acid includes a nucleotide sequence having 80% or more identity (e.g., 85% or more, 90% or more, 95% or more, or 100% identity) with the nucleotide sequence: GTTAA (n)ₓ₁ GTTAA (n)ₓ₂ TA (n)₂ TTTG (SEQ ID NO: 400) (where the percent identity is calculated using only the defined nucleotides of the sequence set forth in SEQ ID NO: 400), where:
[0063] (1) x1 can be an integer in a range of from 3-7 (e.g., in some cases x1 is an integer in a range of from 4-6, in some cases x1 is 4, and in some cases, x1 is 6); and
[0064] (2) x2 can be an integer in a range of from 36-38 (e.g., in some cases x2 is 37). In some cases, x1 is an integer in a range of from 3-7 and x2 is an integer in a range of from 36-38.
   In some cases, x1 is an integer in a range of from 4-6 and x2 is in integer in a range of from 36-38. In some cases, x1 is an integer in a range of from 3-7 and x2 is 37. In some cases, x1 is an integer in a range of from 4-6 and x2 is 37.

[0065] In some embodiments, a promoter of a subject nucleic acid includes the nucleotide sequence: GTTAA (n)ₓ₁ GTTAA (n)ₓ₂ TA (n)₂ TTTG (n)ₓ₃ GAA (SEQ ID NO: 401), where:
[0066] (1) x1 can be an integer in a range of from 3-7 (e.g., in some cases x1 is an integer in a range of from 4-6, in some cases x1 is 4, and in some cases, x1 is 6);
[0067] (2) x2 can be an integer in a range of from 36-38 (e.g., in some cases x2 is 37); and
[0068] (3) x3 can be an integer in a range of from 4-12 (e.g., in some cases x3 is an integer in a range of from 7-11, in some cases x3 is an integer in a range of from 4-7, in some cases x3 is an integer in a range of from 6-8, in some cases x3 is 7, in some cases x3 is 11).
   In some cases, x1 is an integer in a range of from 3-7, x2 is an integer in a range of from 36-38, and x3 is an integer in a range of from 4-12. In some cases, x1 is an integer in a range of from 3-7, x2 is an integer in a range of from 36-38, and x3 is an integer in a range of from 4-7. In some cases, x1 is an integer in a range of from 3-7, x2 is an integer in a range of from 36-38, and x3 is an integer in a range of from 7-11. In some cases, x1 is an integer in a range of from 4-6, x2 is in integer in a range of from 36-38, and x3 is an integer in a range of from 6-8. In some cases, x1 is an integer in a range of from 4-6, x2 is in integer in a range of from 36-38, and x3 is 7. In some cases, x1 is an integer in a range of from 3-7, x2 is 37, and x3 is 7. In some cases, x1 is an integer in a range of from 4-6, x2 is 37, and x3 is 7. In some cases, x1 is an integer in a range of from 3-7, x2 is 37, and x3 is an integer in a range of from 7-11. In some cases, x1 is an integer in a range of from 4-6, x2 is 37, and x3 is an integer in a range of from 7-11.

[0069] In some embodiments, a promoter of a subject nucleic acid includes a nucleotide sequence having 80% or more identity (e.g., 85% or more, 90% or more, 95% or more, or 100% identity) with the nucleotide sequence: GTTAA (n)ₓ₁ GTTAA (n)ₓ₂ TA (n)₂ TTTG (n)ₓ₃ GAA (SEQ ID NO: 401) (where the percent identity is calculated using only the defined nucleotides of the sequence set forth in SEQ ID NO: 401), where:
[0070] (1) x1 can be an integer in a range of from 3-7 (e.g., in some cases x1 is an integer in a range of from 4-6, in some cases x1 is 4, and in some cases, x1 is 6);
[0071] (2) x2 can be an integer in a range of from 36-38 (e.g., in some cases x2 is 37); and (3) x3 can be an integer in a range of from 4-12 (e.g., in some cases x3 is an integer in a range of from 7-11, in some cases x3 is an integer in a range of from 4-7, in some cases x3 is an integer in a range of from 6-8, in some cases x3 is 7, in some cases x3 is 11).
   In some cases, x1 is an integer in a range of from 3-7, x2 is an integer in a range of from 36-38, and x3 is an integer in a range of from 4-12. In some cases, x1 is an integer in a range of from 3-7, x2 is an integer in a range of from 36-38, and x3 is an integer in a range of from 4-7. In some cases, x1 is an integer in a range of from 3-7, x2 is an integer in a range of from 36-38, and x3 is an integer in a range of from 7-11. In some cases, x1 is an integer in a range of from 4-6, x2 is in integer in a range of from 36-38, and x3 is an integer in a range of from 6-8. In some cases, x1 is an integer in a range of from 4-6, x2 is in integer in a range of from 36-38, and x3 is 7. In some cases, x1 is an integer in a range of from 3-7, x2 is 37, and x3 is 7. In some cases, x1 is an integer in a range of from 4-6, x2 is 37, and x3 is 7. In some cases, x1 is an integer in a range of from 3-7, x2 is 37, and x3 is an integer in a range of from 7-11. In some cases, x1 is an integer in a range of from 4-6, x2 is 37, and x3 is an integer in a range of from 7-11.

[0072] In some embodiments, a promoter of a subject nucleic acid includes the nucleotide sequence: GTTAA (n)ₓ₁ GTTAA (n)ₓ₂ TTG (n)ₓ₃ TA (n)₂ TTTG (SEQ ID NO: 402) where:

[0073] (1) x1 can be an integer in a range of from 3-7 (e.g., in some cases x1 is an integer in a range of from 4-6, in some cases x1 is 4, and in some cases, x1 is 6);

[0074] (2) x2 can be an integer in a range of from 14-16 (e.g., in some cases x2 is 15); and

[0075] (3) x3 can be an integer in a range of from 18-20 (e.g., in some cases x3 is 19).

In some cases, x1 is an integer in a range of from 3-7, x2 is an integer in a range of from 14-16, and x3 is an integer in a range of from 18-20. In some cases, x1 is an integer in a range of from 4-6, x2 is an integer in a range of from 14-16, and x3 is an integer in a range of from 18-20. In some cases, x1 is an integer in a range of from 3-7, x2 is 15, and x3 is 19. In some cases, x1 is an integer in a range of from 4-6, x2 is 15, and x3 is 19.

[0076] In some embodiments, a promoter of a subject nucleic acid includes a nucleotide sequence having 80% or more identity (e.g., 85% or more, 90% or more, 95% or more, or 100% identity) with the nucleotide sequence: GTTAA (n)ₓ₁ GTTAA (n)ₓ₂ TTG (n)ₓ₃ TA (n)₂ TTTG (SEQ ID NO: 402) (where the percent identity is calculated using only the defined nucleotides of the sequence set forth in SEQ ID NO: 402), where:
[0077] (1) x1 can be an integer in a range of from 3-7 (e.g., in some cases x1 is an integer in a range of from 4-6, in some cases x1 is 4, and in some cases, x1 is 6);
[0078] (2) x2 can be an integer in a range of from 14-16 (e.g., in some cases x2 is 15); and
[0079] (3) x3 can be an integer in a range of from 18-20 (e.g., in some cases x3 is 19).
[0080] In some cases, x1 is an integer in a range of from 3-7, x2 is an integer in a range of from 14-16, and x3 is an integer in a range of from 18-20.
   In some cases, x1 is an integer in a range of from 4-6, x2 is an integer in a range of from 14-16, and x3 is an integer in a range of from 18-20. In some cases, x1 is an integer in a range of from 3-7, x2 is 15, and x3 is 19. In some cases, x1 is an integer in a range of from 4-6, x2 is 15, and x3 is 19.

[0081] In some embodiments, a promoter of a subject nucleic acid includes the nucleotide sequence: GTTAA (n)ₓ₁ GTTAAA (n)ₓ₂ TTG (n)ₓ₃ TA (n)₂ TTTG (SEQ ID NO: 404) where:

[0082] (1) x1 can be an integer in a range of from 3-7 (e.g., in some cases x1 is an integer in a range of from 4-6, in some cases x1 is 4, and in some cases, x1 is 6);

[0083] (2) x2 can be an integer in a range of from 14-16 (e.g., in some cases x2 is 15); and

[0084] (3) x3 can be an integer in a range of from 18-20 (e.g., in some cases x3 is 19).

In some cases, x1 is an integer in a range of from 3-7, x2 is an integer in a range of from 14-16, and x3 is an integer in a range of from 18-20. In some cases, x1 is an integer in a range of from 4-6, x2 is an integer in a range of from 14-16, and x3 is an integer in a range of from 18-20. In some cases, x1 is an integer in a range of from 3-7, x2 is 15, and x3 is 19. In some cases, x1 is an integer in a range of from 4-6, x2 is 15, and x3 is 19.

[0085] In some embodiments, a promoter of a subject nucleic acid includes a nucleotide sequence having 80% or more identity (e.g., 85% or more, 90% or more, 95% or more, or 100% identity) with the nucleotide sequence: GTTAA (n)ₓ₁ GTTAAA (n)ₓ₂ TTG (n)ₓ₃ TA (n)₂ TTTG (SEQ ID NO: 404) (where the percent identity is calculated using only the defined nucleotides of the sequence set forth in SEQ ID NO: 404), where:
[0086] (1) x1 can be an integer in a range of from 3-7 (e.g., in some cases x1 is an integer in a range of from 4-6, in some cases x1 is 4, and in some cases, x1 is 6);
[0087] (2) x2 can be an integer in a range of from 14-16 (e.g., in some cases x2 is 15); and
[0088] (3) x3 can be an integer in a range of from 18-20 (e.g., in some cases x3 is 19).
[0089] In some cases, x1 is an integer in a range of from 3-7, x2 is an integer in a range of from 14-16, and x3 is an integer in a range of from 18-20.
   In some cases, x1 is an integer in a range of from 4-6, x2 is an integer in a range of from 14-16, and x3 is an integer in a range of from 18-20. In some cases, x1 is an integer in a range of from 3-7, x2 is 15, and x3 is 19. In some cases, x1 is an integer in a range of from 4-6, x2 is 15, and x3 is 19.

[0090] In some embodiments, a promoter of a subject nucleic acid includes the nucleotide sequence: GTTAA (n)ₓ₁ GTTAA (n)ₓ₂ TTG (n)ₓ₃ TA (n)₂ TTTG (n)ₓ₄ GAA (SEQ ID NO: 403) where:
[0091] (1) x1 can be an integer in a range of from 3-7 (e.g., in some cases x1 is an integer in a range of from 4-6, in some cases x1 is 4, and in some cases, x1 is 6);
[0092] (2) x2 can be an integer in a range of from 14-16 (e.g., in some cases x2 is 15);
[0093] (3) x3 can be an integer in a range of from 18-20 (e.g., in some cases x3 is 19); and
[0094] (4) x4 can be an integer in a range of from 4-12 (e.g., in some cases x4 is an integer in a range of from 7-11, in some cases x4 is an integer in a range of from 4-7, in some cases x4 is an integer in a range of from 6-8, in some cases x4 is 7, in some cases x4 is 11).
   In some cases, x1 is an integer in a range of from 3-7, x2 is an integer in a range of from 14-16, x3 is an integer in a range of from 18-20, and x4 is an integer in a range of from 4-12. In some cases, x1 is an integer in a range of from 3-7, x2 is an integer in a range of from 14-16, x3 is an integer in a range of from 18-20, and x4 is an integer in a range of from 4-7. In some cases, x1 is an integer in a range of from 3-7, x2 is an integer in a range of from 14-16, x3 is an integer in a range of from 18-20, and x4 is an integer in a range of from 7-11. In some cases, x1 is an integer in a range of from 4-6, x2 is an integer in a range of from 14-16, x3 is an integer in a range of from 18-20, and x4 is an integer in a range of from 6-8. In some cases, x1 is an integer in a range of from 4-6, x2 is an integer in a range of from 14-16, x3 is an integer in a range of from 18-20, and x4 is 7. In some cases, x1 is an integer in a range of from 3-7, x2 is 15, x3 is 19, and x4 is an integer in a range of from 7-11. In some cases, x1 is an integer in a range of from 3-7, x2 is 15, x3 is 19, and x4 is 7. In some cases, x1 is an integer in a range of from 4-6, x2 is 15, x3 is 19, and x4 is an integer in a range of from 7-11. In some cases, x1 is an integer in a range of from 4-6, x2 is 15, x3 is 19, and x4 is 7.

[0095] In some embodiments, a promoter of a subject nucleic acid includes a nucleotide sequence having 80% or more identity (e.g., 85% or more, 90% or more, 95% or more, or 100% identity) with the nucleotide sequence: GTTAA (n)ₓ₁ GTTAA (n)ₓ₂ TTG (n)ₓ₃ TA (n)₂ TTTG (n)ₓ₄ GAA (SEQ ID NO: 403) (where the percent identity is calculated using only the defined nucleotides of the sequence set forth in SEQ ID NO: 403), where:
[0096] (1) x1 can be an integer in a range of from 3-7 (e.g., in some cases x1 is an integer in a range of from 4-6, in some cases x1 is 4, and in some cases, x1 is 6);
[0097] (2) x2 can be an integer in a range of from 14-16 (e.g., in some cases x2 is 15);
[0098] (3) x3 can be an integer in a range of from 18-20 (e.g., in some cases x3 is 19); and
[0099] (4) x4 can be an integer in a range of from 4-12 (e.g., in some cases x4 is an integer in a range of from 7-11, in some cases x4 is an integer in a range of from 4-7, in some cases x4 is an integer in a range of from 6-8, in some cases x4 is 7, in some cases x4 is 11).
   In some cases, x1 is an integer in a range of from 3-7, x2 is an integer in a range of from 14-16, x3 is an integer in a range of from 18-20, and x4 is an integer in a range of from 4-12. In some cases, x1 is an integer in a range of from 3-7, x2 is an integer in a range of from 14-16, x3 is an integer in a range of from 18-20, and x4 is an integer in a range of from 4-7. In some cases, x1 is an integer in a range of from 3-7, x2 is an integer in a range of from 14-16, x3 is an integer in a range of from 18-20, and x4 is an integer in a range of from 7-11. In some cases, x1 is an integer in a range of from 4-6. x2 is an integer in a range of from 14-16, x3 is an integer in a range of from 18-20, and x4 is an integer in a range of from 6-8. In some cases, x1 is an integer in a range of from 4-6, x2 is an integer in a range of from 14-16, x3 is an integer in a range of from 18-20, and x4 is 7. In some cases, x1 is an integer in a range of from 3-7, x2 is 15, x3 is 19, and x4 is an integer in a range of from 7-11. In some cases, x1 is an integer in a range of from 3-7, x2 is 15, x3 is 19, and x4 is 7. In some cases, x1 is an integer in a range of from 4-6, x2 is 15, x3 is 19, and x4 is an integer in a range of from 7-11. In some cases, x1 is an integer in a range of from 4-6, x2 is 15, x3 is 19, and x4 is 7.

[0100] In some embodiments, a promoter of a subject nucleic acid includes a nucleotide sequence of the group of nucleotide sequences presented in Table 13, wherein “n” represents a nucleotide that is independently selected from A, C. G, and T. In some embodiments, a promoter of a subject nucleic acid may include a nucleotide sequence having 80% or more identity to a nucleotide sequence presented in Table 13, wherein the percent identity is calculated using only the defined nucleotides. In some cases, the promoter may include a nucleotide sequences having 85% or more, 90% or more, 95% or more, or 100% identity to a nucleotide sequence presented in Table 13.

TABLE 13
Consensus promoter sequences of the disclosure.
Consensus Sequence

GTTAA(n)₄₋₇GTTAA(n)₁₂₋₁₆TTG(n)₁₈₋₂₂TA(n)₂TTTG
(SEQ ID NO: 492)
GTTAA(n)₄₋₈GTTAA(n)₁₂₋₁₆TTG(n)₁₈₋₂₂TA(n)₂TTTG
(SEQ ID NO: 493)
GTTAA(n)₃₋₇GTTAA(n)₁₂₋₁₆TTG(n)₁₈₋₂₂TA(n)₂TTTG
(SEQ ID NO: 494)
GTTAA(n)₄₋₇GTTAA(n)₁₂₋₁₆TTG(n)₁₈₋₂₂TA(n)₂TTGC
(SEQ ID NO: 495)
GTTAA(n)₃₋₇GTTAA(n)₃₆₋₃₈TA(n)₂TTTG
(SEQ ID NO: 496)
GTTAA(n)₄₋₇GTTAA(n)₃₆₋₃₈TA(n)₂TTTG
(SEQ ID NO: 497)
GTTAA(n)₄₋₇GTTAA(n)₃₄₋₃₈TA(n)₂TTTG
(SEQ ID NO: 498)
GTTAA(n)₄₋₇GTTAA(n)₃₆₋₃₉TA(n)₂TTTG
(SEQ ID NO: 499)
GTTAA(n)₄₋₇GTTAA(n)₃₆₋₃₉TA(n)₂TTTGC
(SEQ ID NO: 500)
GTTAA(n)₀₋₂₀GTTAA(n)₁₀₋₆₀TA(n)₂TTTG
(SEQ ID NO: 501)
TTAA(n)₀₋₁₀TTAA(n)₃₀₋₅₀TA(n)₂TTTG
(SEQ ID NO: 502)
GTTAA(n)₄₋₇GTTAA
(SEQ ID NO: 503)
GTTAA(n)₄₈₋₅₄TTTG
(SEQ ID NO: 504)
GTTAA(n)₃₆₋₃₈TA
(SEQ ID NO: 505)
GTTAA(n)₄₀₋₄₂TTTG
(SEQ ID NO: 506)
GTTAA(n)₃₋₇GTTAA(n)₃₆₋₃₈TA
(SEQ ID NO: 507)
GTTAA(n)₃₋₇GTTAA(n)₄₀₋₄₂TTTG
(SEQ ID NO: 508)
GTTAA(n)₄₄₋₅₀TA(n)₂TTTG
(SEQ ID NO: 509)
GITAA(n)₃₆₋₃₈TA(n)₂TTTG
(SEQ ID NO: 510)

[0101] The above sequences (SEQ ID NOs: 400-404) are found in SEQ ID NOs: 8, 388, 393, 394, 397, and 406-407 (see Table 6, Table 7, and FIG. 20). For example see FIG. 20 for an alignment of two identified promoter sequences and FIG. 2 (panel d) which depicts results from mutagenesis experiments throughout a promoter sequence of SEQ ID NO: 8.

[0102] In some cases, a promoter of a subject nucleic acid satisfies one or more of the formulas above (e.g., having X % identity to any of SEQ ID NOs: 400-404) and also has identity with a Bacteroides phage promoter sequence set forth herein (for examples, see SEQ ID NOs: 1-8, 151-364, 381-388, and 405-407). Thus, in some cases, a promoter of a subject nucleic acid includes a nucleotide sequence having: (1) X % identity to any of SEQ ID NOs: 400-404; and/r (2) X % identity with a promoter sequence set forth herein (see the paragraphs below for examples). As one illustrative example, in some cases, a promoter of a subject nucleic acid includes a nucleotide sequence having: (1) 80% or more identity with the sequence set forth in any one of SEQ ID NOs: 400-404; and/or (2) 80% or more identity with the promoter sequence set forth in any of SEQ ID NOs: 388 and 407. Any combination of the above (X % identity to any of SEQ ID NOs: 400-404) with the below (e.g., X % identity with a promoter sequence set forth herein, e.g., as a substitute for “388 and 407” in the previous sentence) is suitable, and any combination can be separated by an “and/or” as exemplified in this paragraph.

[0103] Examples of promoter sequences operable in Bacteroides cells include, but are not limited to those presented in Tables 4-7. For example, in some cases, the promoter of a subject nucleic acid includes a nucleotide sequence having 75% or more identity (e.g., 80% or more, 85% or more, 90% or more, 95% or more, 98% or more, 99% or more, 99.5% or more, 99.8% or more, or 100% identity) with the Bacteroides phage promoter sequence set forth as SEQ ID NO: 8. In some cases, the promoter includes a nucleotide sequence having 90% or more identity (e.g., 92% or more, 95% or more, 98% or more, 99% or more, 99.5% or more, 99.8% or more, or 100% identity) with the Bacteroides phage promoter sequence set forth as SEQ ID NO: 8.

[0104] In some cases, the promoter of a subject nucleic acid includes a nucleotide sequence having 75% or more identity (e.g., 80% or more, 85% or more, 90% or more, 95% or more, 98% or more, 99% or more, 99.5% or more, 99.8% or more, or 100% identity) with the Bacteroides phage promoter sequence set forth as SEQ ID NO: 388. In some cases, the promoter includes a nucleotide sequence having 90% or more identity (e.g., 92% or more, 95% or more, 98% or more, 99% or more, 99.5% or more, 99.8% or more, or 100% identity) with the Bacteroides phage promoter sequence set forth as SEQ ID NO: 388.

[0105] In some cases, the promoter of a subject nucleic acid includes a nucleotide sequence having 75% or more identity (e.g., 80% or more, 85% or more, 90% or more, 95% or more, 98% or more, 99% or more, 99.5% or more, 99.8% or more, or 100% identity) with the Bacteroides phage promoter sequence set forth as SEQ ID NO: 407 (or in some cases SEQ ID NO: 406). In some cases, the promoter includes a nucleotide sequence having 90% or more identity (e.g., 92% or more, 95% or more, 98% or more, 99% or more, 99.5% or more, 99.8% or more, or 100% identity) with the Bacteroides phage promoter sequence set forth as SEQ ID NO: 407 (or in some cases SEQ ID NO: 406).

[0106] In some cases, the promoter of a subject nucleic acid includes a nucleotide sequence having 75% or more identity (e.g., 80% or more, 85% or more, 90% or more, 95% or more, 98% or more, 99% or more, 99.5% or more, 99.8% or more, or 100% identity) with the promoter sequence set forth in any of SEQ ID NOs: 388 and 406 (or in some cases SEQ ID NOs: 388 and 407). In some cases, the promoter of a subject nucleic acid includes a nucleotide sequence having 90% or more identity (e.g., 92% or more, 95% or more, 98% or more, 99% or more, 99.5% or more, 99.8% or more, or 100% identity) with the promoter sequence set forth in any of SEQ ID NOs: 388 and 406 (or in some cases SEQ ID NOs: 388 and 407). In some cases, the promoter of a subject nucleic acid includes the promoter sequence set forth in any of SEQ ID NOs: 388 and 406 (or in some cases SEQ ID NOs: 388 and 407).

[0107] In some cases, the promoter of a subject nucleic acid includes a nucleotide sequence having 75% or more identity (e.g., 80% or more, 85% or more, 90% or more, 95% or more, 98% or more, 99% or more, 99.5% or more, 99.8% or more, or 100% identity) with the promoter sequence set forth in any of SEQ ID NOs: 1-8. In some cases, the promoter of a subject nucleic acid includes a nucleotide sequence having 90% or more identity (e.g., 92% or more, 95% or more, 98% or more, 99% or more, 99.5% or more, 99.8% or more, or 100% identity) with the promoter sequence set forth in any of SEQ ID NOs: 1-8. In some cases, the promoter of a subject nucleic acid includes the promoter sequence set forth in any of SEQ ID NOs: 1-8.

[0108] In some cases, the promoter of a subject nucleic acid includes a nucleotide sequence having 75% or more identity (e.g., 80% or more, 85% or more, 90% or more, 95% or more, 98% or more, 99% or more, 99.5% or more, 99.8% or more, or 100% identity) with the promoter sequence set forth in any of SEQ ID NOs: 1-8 and 381-388. In some cases, the promoter of a subject nucleic acid includes a nucleotide sequence having 90% or more identity (e.g., 92% or more, 95% or more, 98% or more, 99% or more, 99.5% or more, 99.8% or more, or 100% identity) with the promoter sequence set forth in any of SEQ ID NOs: 1-8 and 381-388. In some cases, the promoter of a subject nucleic acid includes the promoter sequence set forth in any of SEQ ID NOs: 1-8 and 381-388.

[0109] In some cases, the promoter of a subject nucleic acid includes a nucleotide sequence having 75% or more identity (e.g., 80% or more, 85% or more, 90% or more, 95% or more, 98% or more, 99% or more, 99.5% or more, 99.8% or more, or 100% identity) with the promoter sequence set forth in any of SEQ ID NOs: 1-8, 151-364, and 381-388. In some cases, the promoter of a subject nucleic acid includes a nucleotide sequence having 90% or more identity (e.g., 92% or more, 95% or more, 98% or more, 99% or more, 99.5% or more, 99.8% or more, or 100% identity) with the promoter sequence set forth in any of SEQ ID NOs: 1-8, 151-364, and 381-388. In some cases, the promoter of a subject nucleic acid includes the promoter sequence set forth in any of SEQ ID NOs: 1-8, 151-364, and 381-388.

[0110] In some cases, the promoter of a subject nucleic acid is a synthetic promoter (i.e., the promoter is not a naturally occurring promoter, e.g., the promoter includes a nucleotide sequence having at least one mutation relative to a corresponding wild type promoter). In some cases, the promoter of a subject nucleic acid is a synthetic promoter that includes a nucleotide sequence having 75% or more identity (e.g., 80% or more, 85% or more, 90% or more, 95% or more, 98% or more, 99% or more, 99.5% or more, or 99.8% or more) with the Bacteroides phage promoter sequence set forth as SEQ ID NO: 8. In some cases, the promoter of a subject nucleic acid is a synthetic promoter that includes a nucleotide sequence having 90% or more identity (e.g., 92% or more, 95% or more, 98% or more, 99% or more, 99.5% or more, or 99.8% or more) with the Bacteroides phage promoter sequence set forth as SEQ ID NO: 8.

[0111] In some cases, the promoter of a subject nucleic acid is a synthetic promoter (i.e., the promoter is not a naturally occurring promoter, e.g., the promoter includes a nucleotide sequence having at least one mutation relative to a corresponding wild type promoter). In some cases, the promoter of a subject nucleic acid is a synthetic promoter that includes a nucleotide sequence having 75% or more identity (e.g., 80% or more, 85% or more, 90% or more, 95% or more, 98% or more, 99% or more, 99.5% or more, or 99.8% or more) with the Bacteroides phage promoter sequence set forth as SEQ ID NO: 388. In some cases, the promoter of a subject nucleic acid is a synthetic promoter that includes a nucleotide sequence having 90% or more identity (e.g., 92% or more, 95% or more, 98% or more, 99% or more, 99.5% or more, or 99.8% or more) with the Bacteroides phage promoter sequence set forth as SEQ ID NO: 388.

[0112] In some cases, the promoter of a subject nucleic acid is a synthetic promoter (i.e., the promoter is not a naturally occurring promoter, e.g., the promoter includes a nucleotide sequence having at least one mutation relative to a corresponding wild type promoter). In some cases, the promoter of a subject nucleic acid is a synthetic promoter that includes a nucleotide sequence having 75% or more identity (e.g., 80% or more, 85% or more, 90% or more, 95% or more, 98% or more, 99% or more, 99.5% or more, or 99.8% or more) with the Bacteroides phage promoter sequence set forth as SEQ ID NO: 407 (or in some cases SEQ ID NO: 406). In some cases, the promoter of a subject nucleic acid is a synthetic promoter that includes a nucleotide sequence having 90% or more identity (e.g., 92% or more, 95% or more, 98% or more, 99% or more, 99.5% or more, or 99.8% or more) with the Bacteroides phage promoter sequence set forth as SEQ ID NO: 407 (or in some cases SEQ ID NO: 406).

[0113] In some cases, the promoter of a subject nucleic acid is a synthetic promoter that includes a nucleotide sequence having 75% or more identity (e.g., 80% or more, 85% or more, 90% or more, 95% or more, 98% or more, 99% or more, 99.5% or more, or 99.8% or more) with the promoter sequence set forth in any of SEQ ID NOs: 1-8. In some cases, the promoter of a subject nucleic acid is a synthetic promoter that includes a nucleotide sequence having 90% or more identity (e.g., 92% or more, 95% or more, 98% or more, 99% or more, 99.5% or more, or 99.8% or more) with the promoter sequence set forth in any of SEQ ID NOs: 1-8.

[0114] In some cases, the promoter of a subject nucleic acid is a synthetic promoter that includes a nucleotide sequence having 75% or more identity (e.g., 80% or more, 85% or more, 90% or more, 95% or more, 98% or more, 99% or more, 99.5% or more, or 99.8% or more) with the promoter sequence set forth in any of SEQ ID NOs: 388 and 406 (or in some cases SEQ ID NOs: 388 and 407). In some cases, the promoter of a subject nucleic acid is a synthetic promoter that includes a nucleotide sequence having 90% or more identity (e.g., 92% or more, 95% or more, 98% or more, 99% or more, 99.5% or more, or 99.8% or more) with the promoter sequence set forth in any of SEQ ID NOs: 388 and 406 (or in some cases SEQ ID NOs: 388 and 407).

[0115] In some cases, the promoter of a subject nucleic acid is a synthetic promoter that includes a nucleotide sequence having 75% or more identity (e.g., 80% or more, 85% or more, 90% or more, 95% or more, 98% or more, 99% or more, 99.5% or more, or 99.8% or more) with the promoter sequence set forth in any of SEQ ID NOs: 1-8 and 381-388. In some cases, the promoter of a subject nucleic acid is a synthetic promoter that includes a nucleotide sequence having 90% or more identity (e.g., 92% or more, 95% or more, 98% or more, 99% or more, 99.5% or more, or 99.8% or more) with the promoter sequence set forth in any of SEQ ID NOs: 1-8 and 381-388.

[0116] In some cases, the promoter of a subject nucleic acid is a synthetic promoter that includes a nucleotide sequence having 75% or more identity (e.g., 80% or more, 85% or more, 90% or more, 95% or more, 98% or more, 99% or more, 99.5% or more, or 99.8% or more) with the promoter sequence set forth in any of SEQ ID NOs: 1-8, 151-364, and 381-388. In some cases, the promoter of a subject nucleic acid is a synthetic promoter that includes a nucleotide sequence having 90% or more identity (e.g., 92% or more, 95% or more, 98% or more, 99% or more, 99.5% or more, or 99.8% or more) with the promoter sequence set forth in any of SEQ ID NOs: 1-8, 151-364, and 381-388.

[0117] In some cases, the promoter of a subject nucleic acid is a synthetic promoter that includes a nucleotide sequence having 75% or more identity (e.g., 80% or more, 85% or more, 90% or more, 95% or more, 98% or more, 99% or more, 99.5% or more, 99.8% or more, or 100% identity) with the synthetic promoter sequence set forth in any of SEQ ID NOs: 1-7. In some cases, the promoter of a subject nucleic acid is a synthetic promoter that includes a nucleotide sequence having 90% or more identity (e.g., 92% or more, 95% or more, 98% or more, 99% or more, 99.5% or more, 99.8% or more, or 100% identity) with the synthetic promoter sequence set forth in any of SEQ ID NOs: 1-7. In some cases, the promoter of a subject nucleic acid is a synthetic promoter that includes the nucleotide sequence set forth in any of SEQ ID NOs: 1-7.

[0118] In some cases, the promoter of a subject nucleic acid is a synthetic promoter that includes a nucleotide sequence having 75% or more identity (e.g., 80% or more, 85% or more, 90% or more, 95% or more, 98% or more, 99% or more, 99.5% or more, 99.8% or more, or 100% identity) with the synthetic promoter sequence set forth in any of SEQ ID NOs: 381-387. In some cases, the promoter of a subject nucleic acid is a synthetic promoter that includes a nucleotide sequence having 90% or more identity (e.g., 92% or more, 95% or more, 98% or more, 99% or more, 99.5% or more, 99.8% or more, or 100% identity) with the synthetic promoter sequence set forth in any of SEQ ID NOs: 381-387. In some cases, the promoter of a subject nucleic acid is a synthetic promoter that includes the nucleotide sequence set forth in any of SEQ ID NOs: 381-387.

[0119] In some cases, the promoter of a subject nucleic acid is a synthetic promoter that includes a nucleotide sequence having 75% or more identity (e.g., 80% or more, 85% or more, 90% or more, 95% or more, 98% or more, 99% or more, 99.5% or more, 99.8% or more, or 100% identity) with the synthetic promoter sequence set forth in any of SEQ ID NOs: 1-7 and 381-387. In some cases, the promoter of a subject nucleic acid is a synthetic promoter that includes a nucleotide sequence having 90% or more identity (e.g., 92% or more, 95% or more, 98% or more, 99% or more, 99.5% or more, 99.8% or more, or 100% identity) with the synthetic promoter sequence set forth in any of SEQ ID NOs: 1-7 and 381-387. In some cases, the promoter of a subject nucleic acid is a synthetic promoter that includes the nucleotide sequence set forth in any of SEQ ID NOs: 1-7 and 381-387.

[0120] In some cases, the promoter of a subject nucleic acid is a synthetic promoter that includes a nucleotide sequence having 75% or more identity (e.g., 80% or more, 85% or more, 90% or more, 95% or more, 98% or more, 99% or more, 99.5% or more, 99.8% or more, or 100% identity) with the synthetic promoter sequence set forth in any of SEQ ID NOs: 1-7, 151-364, and 381-387. In some cases, the promoter of a subject nucleic acid is a synthetic promoter that includes a nucleotide sequence having 90% or more identity (e.g., 92% or more, 95% or more, 98% or more, 99% or more, 99.5% or more, 99.8% or more, or 100% identity) with the synthetic promoter sequence set forth in any of SEQ ID NOs: 1-7, 151-364, and 381-387. In some cases, the promoter of a subject nucleic acid is a synthetic promoter that includes the nucleotide sequence set forth in any of SEQ ID NOs: 1-7, 151-364, and 381-387.

TABLE 4
Promoters and ribosome binding site (RBS) sequences of the disclosure.
“sp”: synthetic promoter; “sr”: synthetic RBS. SEQ ID NOs: 1-7 are synthetic promoters
(mutation of wild type phage promoter). SEQ ID NO: 8 is a wild type phage promoter. SEQ ID
NOs: 10-18 are synthetic RBSs (i.e., include an altered sequence relative to wild type phage
RBSs). SEQ ID NOs: 20-83 are promoter/RBS combinations from promoters of SEQ ID NOs
1-8 paired with RBSs of SEQ ID NOs 11-18 (64 combinations, promoter/RBS, length of each
combination is 200 nucleotides (nt)). SEQ ID NOs: 28-83 are promoter/RBS combinations
from promoters of SEQ ID NOs 2-8 paired with RBSs of SEQ ID NOs 11-18 (56
combinations, promoter/RBS, length of each combination is 200 nucleotides (nt)). SEQ ID
NOs: 151-364 are additional synthetic promoters. SEQ ID NOs: 381-388 are truncated by 26
nt at the 5' end and 3 nt at the 3' end and relative to SEQ ID NOs: 1-8, respectively (see −74
+17 of Table 6 and −100 +20 of Table 7).

| | | | |
|---|---|---|---|
| SEQ | | | Length |
| ID NO: | Description | sequence | (nt) |

Promoters

| | | | |
|---|---|---|---|
| 1 | sp1 | caattgggctaccttttttttgtaaaaaaaaaccccgcccctgacagggcgggg | 120 |
| | (P_BfP3E1) | ttttttttttcacttgaactttcaaataatgttcttataaaaccagtgtcgaaagaaac | |
| | | aaagtag | |
| 2 | sp2 | caattgggctaccttttttttgtaaaaaaaaaccccgcccctgacagggcgggg | 120 |
| | (P_BfP2E2) | ttttttttttcacttgaactttcaaataatgttcttatatatgcagtgtcgaaagaaaca | |
| | | aagtag | |
| 3 | sp3 | caattgggctaccttttttttgttttgtttgcaatggttaatctattgttaaaatttaaagtt | 120 |
| | (P_BfP2E3) | tcacttgaactttcaaataatgttcttatatgtgcagtgtcgaaagaaacaaagta | |
| | | g | |
| 4 | sp4 | caattgggctaccttttttttgttttgtttgcaatggttaatctattgttaacatttaaagtt | 120 |
| | (P_BfP1E4) | tcacttgaactttcaaataatgttcttatattttcagtgtcgaaagaaacaaagtag | |
| | | g | |
| 5 | sp5 | caattgggctaccttttttttgttttgtttgcaatggttaatctattgttaaaatttaaagtt | 120 |
| | (P_BfP5E4) | tcacttgaactttcaaataatgttcttctatttgcagtgtcgaaagaaacaaagta | |
| | | g | |
| 6 | sp6 | caattgggctaccttttttttgattgtttgcaatggttaatctattgttaaaatttaaagtt | 120 |
| | (P_BfP2E5) | tcacttgaactttcaaataatgttcttatatttccagtgtcgaaagaaacaaagta | |
| | | g | |
| 7 | sp7 | caattgggctaccttttttttgttttgtttgcaatggttaatctattgttgaaatttaaagtt | 120 |
| | (P_BfP4E5) | tcacttgaactttcaaataatgttcttatatttgcagtgtcgaaagaaacaaagta | |
| | | g | |
| 8 | WT phage | caattgggctaccttttttttgttttgtttgcaatggttaatctattgttaaaatttaaagtt | 120 |
| | promoter (P6) | tcacttgaactttcaaataatgttcttatatttgcagTgtcgaaagaaacaaagta | |
| | (P_BfP1E6) | g | |
| | (−100, +20) | | |
| 406 | WT phage | gagtaactacgataataaagtgataattcaatgttaaaacagttaatgcacgtt | 114 |
| | promoter (P5) | aaagtatttgctactgagaaatatatccgtatatttgcagcgtagaagttattact | |
| | (−94, +20) | aaca | |

DNA encoding Ribosomal Binding Sequences (RBSs)

| | | | |
|---|---|---|---|
| 10 | sr | gactgatctatggattcaaaaaaatttaaaataatg | 36 |
| | (synthetic RBS) | | |
| 11 | sr1 (RBS1) | gactgatcggcgcgactcacgcgccgatcagtaatg | 36 |
| 12 | sr2 (RBS2) | gactgatcaggaagagtaaaaaatattaaaataatg | 36 |
| 13 | sr3 (RBS3) | gactgatctctggggtgaataaaatttataataatg | 36 |
| 14 | sr4 (RBS4) | gactgatcccccattctattaaattttagaataatg | 36 |
| 15 | sr5 (RBS5) | gactgatcggtgttagctttaaatattagaataatg | 36 |
| 16 | sr6 (RBS6) | gactgatctagcactcttaaaaaaattaaaataatg | 36 |
| 17 | sr7 (RBS7) | gactgatcgtaatctttaaaaaaaataaaaataatg | 36 |
| 18 | sr8 (RBS8) | gactgatcgtccatcaatttaaaatttaaaataatg | 36 |

[0121] In some embodiments, a subject nucleic acid includes, upstream (5′) of the promoter, a terminator sequence. For example, a terminator sequence located upstream can be used to reduce the chance that the operably linked sequence downstream (3′) of the subject promoter is not transcribed as part of a transcript from an upstream promoter. In other words, a terminator sequence can be positioned 5′ of a subject promoter as an element that can terminate transcription from an upstream promoter. Any convenient terminator sequence can be used. When present in the working examples below, the terminator sequence gataaaacgaaaggctcagtcgaaagactgggcctttcgtttta (SEQ ID NO: 409) was used.

[0122] In some cases, a subject nucleic acid includes a terminator sequence downstream (3) of a subject nucleotide sequence of interest in order to terminate transcription from the subject promoter (the promoter that is operably linked to the nucleotide sequence of interest).

### Ribosomal Binding Site (RBS)

[0123] In some embodiments, a subject nucleic acid includes a nucleotide sequence encoding a ribosomal binding site (RBS), e.g., where the sequence encoding the RBS is operably linked to the promoter and is positioned between the promoter and the nucleotide sequence of interest. As such, in some cases, the RBS is positioned 3′ of the promoter. In some cases, the RBS is positioned 5′ of the nucleotide sequence of interest. In some cases, the RBS is positioned 3′ of the promoter and 5′ of the nucleotide sequence of interest.

[0124] Examples of nucleotide sequences encoding suitable RBS sequences include, but are not limited to those presented in Table 4. For example, in some cases, the sequence encoding an RBS of a subject nucleic acid includes a nucleotide sequence having 75% or more identity (e.g., 80% or more, 85% or more, 90% or more, 95% or more, 98% or more, 99% or more, 99.5% or more, 99.8% or more, or 100% identity) with the nucleotide sequence set forth in any of SEQ ID NOs: 10-18. In some cases, the sequence encoding an RBS of a subject nucleic acid includes a nucleotide sequence having 90% or more identity (e.g., 92% or more, 95% or more, 98% or more, 99% or more, 99.5% or more, 99.8% or more, or 100% identity) with the nucleotide sequence set forth in any of SEQ ID NOs: 10-18. In some cases, the sequence encoding an RBS of a subject nucleic acid includes the nucleotide sequence set forth in any of SEQ ID NOs: 10-18.

[0125] In some cases, the sequence encoding an RBS of a subject nucleic acid includes a nucleotide sequence having 75% or more identity (e.g., 80% or more, 85% or more, 90% or more, 95% or more, 98% or more, 99% or more, 99.5% or more, 99.8% or more, or 100% identity) with the nucleotide sequence set forth in any of SEQ ID NOs: 11-18. In some cases, the sequence encoding an RBS of a subject nucleic acid includes a nucleotide sequence having 90% or more identity (e.g., 92% or more, 95% or more, 98% or more, 99% or more, 99.5% or more, 99.8% or more, or 100% identity) with the nucleotide sequence set forth in any of SEQ ID NOs: 11-18. In some cases, the sequence encoding an RBS of a subject nucleic acid includes the nucleotide sequence set forth in any of SEQ ID NOs: 11-18.

[0126] In some cases, the RBS of a subject nucleic acid is a synthetic RBS (i.e., includes a mutation relative to a corresponding naturally occurring RBS) and the sequence encoding the synthetic RBS includes a nucleotide sequence having 75% or more identity (e.g., 80% or more, 85% or more, 90% or more, 95% or more, 98% or more, 99% or more, 99.5% or more, 99.8% or more, or 100% identity) with the nucleotide sequence set forth in any of SEQ ID NOs: 11-18. In some cases, the RBS of a subject nucleic acid is a synthetic RBS (i.e., includes a mutation relative to a corresponding naturally occurring RBS) and the sequence encoding the synthetic RBS includes a nucleotide sequence having 90% or more identity (e.g., 92% or more, 95% or more, 98% or more, 99% or more, 99.5% or more, 99.8% or more, or 100% identity) with the nucleotide sequence set forth in any of SEQ ID NOs: 11-18. In some cases, the sequence encoding an RBS of a subject nucleic acid includes the nucleotide sequence set forth in any of SEQ ID NOs: 11-18.

[0127] In some cases, the RBS of a subject nucleic acid is a synthetic RBS (i.e., includes a mutation relative to a corresponding naturally occurring RBS) and the sequence encoding the synthetic RBS includes a nucleotide sequence having 75% or more identity (e.g., 80% or more, 85% or more, 90% or more, 95% or more, 98% or more, 99% or more, 99.5% or more, 99.8% or more, or 100% identity) with the nucleotide sequence set forth in any of SEQ ID NOs: 12-18. In some cases, the RBS of a subject nucleic acid is a synthetic RBS (i.e., includes a mutation relative to a corresponding naturally occurring RBS) and the sequence encoding the synthetic RBS includes a nucleotide sequence having 90% or more identity (e.g., 92% or more, 95% or more, 98% or more, 99% or more, 99.5% or more, 99.8% or more, or 100% identity) with the nucleotide sequence set forth in any of SEQ ID NOs: 12-18. In some cases, the sequence encoding an RBS of a subject nucleic acid includes the nucleotide sequence set forth in any of SEQ ID NOs: 12-18.

### Promoter/RBS Combinations

[0128] Any of the above described promoters can be used in combination with any of the above described RBSs. For example, in some cases, a subject nucleic acid includes a promoter of Table 4 and an RBS of Table 4. In some cases, a subject nucleic acid includes a promoter of Table 4, Table 5, Table 6, or Table 7, and an RBS of Table 4.

[0129] In some embodiments, a subject nucleic acid includes a promoter that includes a nucleotide sequence of a wild type (i.e., naturally occurring) promoter from a phage (e.g., a Bacteroides phage, i.e., a phage that infects Bacteroides cells), and an RBS (e.g., a wild type RBS, a synthetic RBS, an RBS of Table 4, and the like). In some cases, a subject nucleic acid includes a promoter that includes the Bacteroides phage promoter sequence set forth in any of SEQ ID NOs: 400-404; and an RBS (e.g., a wild type RBS, a synthetic RBS, an RBS of Table 4, and the like). In some cases, a subject nucleic acid includes a promoter that includes the Bacteroides phage promoter sequence set forth in any of SEQ ID NOs: 8, 388, 406, and 407; and an RBS (e.g., a wild type RBS, a synthetic RBS, an RBS of Table 4, and the like). In some cases, a subject nucleic acid includes a promoter that includes the Bacteroides phage promoter sequence set forth in any of SEQ ID NOs: 388 and 407; and an RBS (e.g., a wild type RBS, a synthetic RBS, an RBS of Table 4, and the like). In some cases, a subject nucleic acid includes a promoter that includes the Bacteroides phage promoter sequence set forth in SEQ ID NO: 8; and an RBS (e.g., a wild type RBS, a synthetic RBS, an RBS of Table 4, and the like). In some cases, a subject nucleic acid includes a promoter that includes the Bacteroides phage promoter sequence set forth in SEQ ID NO: 406; and an RBS (e.g., a wild type RBS, a synthetic RBS, an RBS of Table 4, and the like). In some cases, a promoter of a subject nucleic acid is a synthetic promoter (i.e., not naturally occurring, e.g., a sequence that has at least one mutation relative to a corresponding wild type promoter sequence); and an RBS (e.g., a wild type RBS, a synthetic RBS, an RBS of Table 4, and the like).

[0130] In some cases, a subject nucleic acid includes a promoter that includes a nucleotide sequence having 75% or more identity (e.g., 80% or more, 85% or more, 90% or more, 95% or more, 98% or more, 99% or more, 99.5% or more, 99.8% or more, or 100% identity) with the promoter sequence set forth in any of SEQ ID NOs: 2-8; and a nucleotide sequence, encoding an RBS, having 75% or more identity (e.g., 80% or more, 85% or more, 90% or more, 95% or more, 98% or more, 99% or more, 99.5% or more, 99.8% or more, or 100% identity) with the nucleotide sequence set forth in any of SEQ ID NOs: 10-18. In some cases, a subject nucleic acid includes a promoter that includes a nucleotide sequence with the promoter sequence set forth in any of SEQ ID NOs: 2-8; and a nucleotide sequence, encoding an RBS, with the nucleotide sequence set forth in any of SEQ ID NOs: 10-18.

[0131] In some cases, a subject nucleic acid includes a promoter that includes a nucleotide sequence having 75% or more identity (e.g., 80% or more, 85% or more, 90% or more, 95% or more, 98% or more, 99% or more, 99.5% or more, 99.8% or more, or 100% identity) with the promoter sequence set forth in any of SEQ ID NOs: 2-8; and a nucleotide sequence, encoding an RBS, having 75% or more identity (e.g., 80% or more, 85% or more, 90% or more, 95% or more, 98% or more, 99% or more, 99.5% or more, 99.8% or more, or 100% identity) with the nucleotide sequence set forth in any of SEQ ID NOs: 11-18. In some cases, a subject nucleic acid includes a promoter that includes a nucleotide sequence with the promoter sequence set forth in any of SEQ ID NOs: 2-8; and a nucleotide sequence, encoding an RBS, with the nucleotide sequence set forth in any of SEQ ID NOs: 11-18.

[0132] In some cases, a subject nucleic acid includes a promoter that includes a nucleotide sequence having 75% or more identity (e.g., 80% or more, 85% or more, 90% or more, 95% or more, 98% or more, 99% or more, 99.5% or more, 99.8% or more, or 100% identity) with the promoter sequence set forth in any of SEQ ID NOs: 2-8; and a nucleotide sequence, encoding an RBS, having 75% or more identity (e.g., 80% or more, 85% or more, 90% or more, 95% or more, 98% or more, 99% or more, 99.5% or more, 99.8% or more, or 100% identity) with the nucleotide sequence set forth in any of SEQ ID NOs: 12-18. In some cases, a subject nucleic acid includes a promoter that includes a nucleotide sequence with the promoter sequence set forth in any of SEQ ID NOs: 2-8; and a nucleotide sequence, encoding an RBS, with the nucleotide sequence set forth in any of SEQ ID NOs: 12-18.

[0133] In some cases, a subject nucleic acid includes a promoter that includes a nucleotide sequence having 75% or more identity (e.g., 80% or more, 85% or more, 90% or more, 95% or more, 98% or more, 99% or more, 99.5% or more, 99.8% or more, or 100% identity) with the promoter sequence set forth in any of SEQ ID NOs: 1-8; and a nucleotide sequence, encoding an RBS, having 75% or more identity (e.g., 80% or more, 85% or more, 90% or more, 95% or more, 98% or more, 99% or more, 99.5% or more, 99.8% or more, or 100% identity) with the nucleotide sequence set forth in any of SEQ ID NOs: 10-18. In some cases, a subject nucleic acid includes a promoter that includes a nucleotide sequence with the promoter sequence set forth in any of SEQ ID NOs: 1-8; and a nucleotide sequence, encoding an RBS, with the nucleotide sequence set forth in any of SEQ ID NOs: 10-18.

[0134] In some cases, a subject nucleic acid includes a promoter that includes a nucleotide sequence having 75% or more identity (e.g., 80% or more, 85% or more, 90% or more, 95% or more, 98% or more, 99% or more, 99.5% or more, 99.8% or more, or 100% identity) with the promoter sequence set forth in any of SEQ ID NOs: 1-8; and a nucleotide sequence, encoding an RBS, having 75% or more identity (e.g., 80% or more, 85% or more, 90% or more, 95% or more, 98% or more, 99% or more, 99.5% or more, 99.8% or more, or 100% identity) with the nucleotide sequence set forth in any of SEQ ID NOs: 11-18. In some cases, a subject nucleic acid includes a promoter that includes a nucleotide sequence with the promoter sequence set forth in any of SEQ ID NOs: 1-8; and a nucleotide sequence, encoding an RBS, with the nucleotide sequence set forth in any of SEQ ID NOs: 11-18.

[0135] In some cases, a subject nucleic acid includes a promoter that includes a nucleotide sequence having 75% or more identity (e.g., 80% or more, 85% or more, 90% or more, 95% or more, 98% or more, 99% or more, 99.5% or more, 99.8% or more, or 100% identity) with the promoter sequence set forth in any of SEQ ID NOs: 1-8; and a nucleotide sequence, encoding an RBS, having 75% or more identity (e.g., 80% or more, 85% or more, 90% or more, 95% or more, 98% or more, 99% or more, 99.5% or more, 99.8% or more, or 100% identity) with the nucleotide sequence set forth in any of SEQ ID NOs: 12-18. In some cases, a subject nucleic acid includes a promoter that includes a nucleotide sequence with the promoter sequence set forth in any of SEQ ID NOs: 1-8; and a nucleotide sequence, encoding an RBS, with the nucleotide sequence set forth in any of SEQ ID NOs: 12-18.

[0136] In some cases, a subject nucleic acid includes a promoter that includes a nucleotide sequence having 75% or more identity (e.g., 80% or more, 85% or more, 90% or more, 95% or more, 98% or more, 99% or more, 99.5% or more, 99.8% or more, or 100% identity) with the promoter sequence set forth in any of SEQ ID NOs: 381-388; and a nucleotide sequence, encoding an RBS, having 75% or more identity (e.g., 80% or more, 85% or more, 90% or more, 95% or more, 98% or more, 99% or more, 99.5% or more, 99.8% or more, or 100% identity) with the nucleotide sequence set forth in any of SEQ ID NOs: 10-18. In some cases, a subject nucleic acid includes a promoter that includes a nucleotide sequence with the promoter sequence set forth in any of SEQ ID NOs: 381-388; and a nucleotide sequence, encoding an RBS, with the nucleotide sequence set forth in any of SEQ ID NOs: 10-18.

[0137] In some cases, a subject nucleic acid includes a promoter that includes a nucleotide sequence having 75% or more identity (e.g., 80% or more, 85% or more, 90% or more, 95% or more, 98% or more, 99% or more, 99.5% or more, 99.8% or more, or 100% identity) with the promoter sequence set forth in any of SEQ ID NOs: 381-388; and a nucleotide sequence, encoding an RBS, having 75% or more identity (e.g., 80% or more, 85% or more, 90% or more, 95% or more, 98% or more, 99% or more, 99.5% or more, 99.8% or more, or 100% identity) with the nucleotide sequence set forth in any of SEQ ID NOs: 11-18. In some cases, a subject nucleic acid includes a promoter that includes a nucleotide sequence with the promoter sequence set forth in any of SEQ ID NOs: 381-388; and a nucleotide sequence, encoding an RBS, with the nucleotide sequence set forth in any of SEQ ID NOs: 11-18.

[0138] In some cases, a subject nucleic acid includes a promoter that includes a nucleotide sequence having 75% or more identity (e.g., 80% or more, 85% or more, 90% or more, 95% or more, 98% or more, 99% or more, 99.5% or more, 99.8% or more, or 100% identity) with the promoter sequence set forth in any of SEQ ID NOs: 381-388; and a nucleotide sequence, encoding an RBS, having 75% or more identity (e.g., 80% or more, 85% or more, 90% or more, 95% or more, 98% or more, 99% or more, 99.5% or more, 99.8% or more, or 100% identity) with the nucleotide sequence set forth in any of SEQ ID NOs: 12-18. In some cases, a subject nucleic acid includes a promoter that includes a nucleotide sequence with the promoter sequence set forth in any of SEQ ID NOs: 381-388; and a nucleotide sequence, encoding an RBS, with the nucleotide sequence set forth in any of SEQ ID NOs: 12-18.

[0139] In some cases, a subject nucleic acid includes a promoter that includes a nucleotide sequence having 75% or more identity (e.g., 80% or more, 85% or more, 90% or more, 95% or more, 98% or more, 99% or more, 99.5% or more, 99.8% or more, or 100% identity) with the promoter sequence set forth in any of SEQ ID NOs: 388 and 407 (or in some cases SEQ ID NOs: 388 and 406); and a nucleotide sequence, encoding an RBS, having 75% or more identity (e.g., 80% or more, 85% or more, 90% or more, 95% or more, 98% or more, 99% or more, 99.5% or more, 99.8% or more, or 100% identity) with the nucleotide sequence set forth in any of SEQ ID NOs: 10-18. In some cases, a subject nucleic acid includes a promoter that includes a nucleotide sequence with the promoter sequence set forth in any of SEQ ID NOs: 388 and 407 (or in some cases SEQ ID NOs: 388 and 406); and a nucleotide sequence, encoding an RBS, with the nucleotide sequence set forth in any of SEQ ID NOs: 10-18.

[0140] In some cases, a subject nucleic acid includes a promoter that includes a nucleotide sequence having 75% or more identity (e.g., 80% or more, 85% or more, 90% or more, 95% or more, 98% or more, 99% or more, 99.5% or more, 99.8% or more, or 100% identity) with the promoter sequence set forth in any of SEQ ID NOs: 388 and 407 (or in some cases SEQ ID NOs: 388 and 406); and a nucleotide sequence, encoding an RBS, having 75% or more identity (e.g., 80% or more, 85% or more, 90% or more, 95% or more, 98% or more, 99% or more, 99.5% or more, 99.8% or more, or 100% identity) with the nucleotide sequence set forth in any of SEQ ID NOs: 11-18. In some cases, a subject nucleic acid includes a promoter that includes a nucleotide sequence with the promoter sequence set forth in any of SEQ ID NOs: 388 and 407 (or in some cases SEQ ID NOs: 388 and 406); and a nucleotide sequence, encoding an RBS, with the nucleotide sequence set forth in any of SEQ ID NOs: 11-18.

[0141] In some cases, a subject nucleic acid includes a promoter that includes a nucleotide sequence having 75% or more identity (e.g., 80% or more, 85% or more, 90% or more, 95% or more, 98% or more, 99% or more, 99.5% or more, 99.8% or more, or 100% identity) with the promoter sequence set forth in any of SEQ ID NOs: 388 and 407 (or in some cases SEQ ID NOs: 388 and 406); and a nucleotide sequence, encoding an RBS, having 75% or more identity (e.g., 80% or more, 85% or more, 90% or more, 95% or more, 98% or more, 99% or more, 99.5% or more, 99.8% or more, or 100% identity) with the nucleotide sequence set forth in any of SEQ ID NOs: 12-18. In some cases, a subject nucleic acid includes a promoter that includes a nucleotide sequence with the promoter sequence set forth in any of SEQ ID NOs: 388 and 407 (or in some cases SEQ ID NOs: 388 and 406); and a nucleotide sequence, encoding an RBS, with the nucleotide sequence set forth in any of SEQ ID NOs: 12-18.

[0142] In some cases, a subject nucleic acid includes a promoter that includes a nucleotide sequence having 75% or more identity (e.g., 80% or more, 85% or more, 90% or more, 95% or more, 98% or more, 99% or more, 99.5% or more, 99.8% or more, or 100% identity) with the promoter sequence set forth in any of SEQ ID NOs: 1-7; and a nucleotide sequence, encoding an RBS, having 75% or more identity (e.g., 80% or more, 85% or more, 90% or more, 95% or more, 98% or more, 99% or more, 99.5% or more, 99.8% or more, or 100% identity) with the nucleotide sequence set forth in any of SEQ ID NOs: 10-18. In some cases, a subject nucleic acid includes a promoter that includes a nucleotide sequence with the promoter sequence set forth in any of SEQ ID NOs: 1-7; and a nucleotide sequence, encoding an RBS, with the nucleotide sequence set forth in any of SEQ ID NOs: 10-18.

[0143] In some cases, a subject nucleic acid includes a promoter that includes a nucleotide sequence having 75% or more identity (e.g., 80% or more, 85% or more, 90% or more, 95% or more, 98% or more, 99% or more, 99.5% or more, 99.8% or more, or 100% identity) with the promoter sequence set forth in any of SEQ ID NOs: 1-7; and a nucleotide sequence, encoding an RBS, having 75% or more identity (e.g., 80% or more, 85% or more, 90% or more, 95% or more, 98% or more, 99% or more, 99.5% or more, 99.8% or more, or 100% identity) with the nucleotide sequence set forth in any of SEQ ID NOs: 11-18. In some cases, a subject nucleic acid includes a promoter that includes a nucleotide sequence with the promoter sequence set forth in any of SEQ ID NOs: 1-7; and a nucleotide sequence, encoding an RBS, with the nucleotide sequence set forth in any of SEQ ID NOs: 11-18.

[0144] In some cases, a subject nucleic acid includes a promoter that includes a nucleotide sequence having 75% or more identity (e.g., 80% or more, 85% or more, 90% or more, 95% or more, 98% or more, 99% or more, 99.5% or more, 99.8% or more, or 100% identity) with the promoter sequence set forth in any of SEQ ID NOs: 1-7; and a nucleotide sequence, encoding an RBS, having 75% or more identity (e.g., 80% or more, 85% or more, 90% or more, 95% or more, 98% or more, 99% or more, 99.5% or more, 99.8% or more, or 100% identity) with the nucleotide sequence set forth in any of SEQ ID NOs: 12-18. In some cases, a subject nucleic acid includes a promoter that includes a nucleotide sequence with the promoter sequence set forth in any of SEQ ID NOs: 1-7; and a nucleotide sequence, encoding an RBS, with the nucleotide sequence set forth in any of SEQ ID NOs: 12-18.

[0145] In some cases, a subject nucleic acid includes a promoter that includes a nucleotide sequence having 75% or more identity (e.g., 80% or more, 85% or more, 90% or more, 95% or more, 98% or more, 99% or more, 99.5% or more, 99.8% or more, or 100% identity) with the promoter sequence set forth in any of SEQ ID NOs: 1-7 and 381-387; and a nucleotide sequence, encoding an RBS, having 75% or more identity (e.g., 80% or more, 85% or more, 90% or more, 95% or more, 98% or more, 99% or more, 99.5% or more, 99.8% or more, or 100% identity) with the nucleotide sequence set forth in any of SEQ ID NOs: 10-18. In some cases, a subject nucleic acid includes a promoter that includes a nucleotide sequence with the promoter sequence set forth in any of SEQ ID NOs: 1-7 and 381-387; and a nucleotide sequence, encoding an RBS, with the nucleotide sequence set forth in any of SEQ ID NOs: 10-18.

[0146] In some cases, a subject nucleic acid includes a promoter that includes a nucleotide sequence having 75% or more identity (e.g., 80% or more, 85% or more, 90% or more, 95% or more, 98% or more, 99% or more, 99.5% or more, 99.8% or more, or 100% identity) with the promoter sequence set forth in any of SEQ ID NOs: 1-7 and 381-387; and a nucleotide sequence, encoding an RBS, having 75% or more identity (e.g., 80% or more, 85% or more, 90% or more, 95% or more, 98% or more, 99% or more, 99.5% or more, 99.8% or more, or 100% identity) with the nucleotide sequence set forth in any of SEQ ID NOs: 11-18. In some cases, a subject nucleic acid includes a promoter that includes a nucleotide sequence with the promoter sequence set forth in any of SEQ ID NOs: 1-7 and 381-387; and a nucleotide sequence, encoding an RBS, with the nucleotide sequence set forth in any of SEQ ID NOs: 11-18.

[0147] In some cases, a subject nucleic acid includes a promoter that includes a nucleotide sequence having 75% or more identity (e.g., 80% or more, 85% or more, 90% or more, 95% or more, 98% or more, 99% or more, 99.5% or more, 99.8% or more, or 100% identity) with the promoter sequence set forth in any of SEQ ID NOs: 1-7 and 381-387; and a nucleotide sequence, encoding an RBS, having 75% or more identity (e.g., 80% or more, 85% or more, 90% or more, 95% or more, 98% or more, 99% or more, 99.5% or more, 99.8% or more, or 100% identity) with the nucleotide sequence set forth in any of SEQ ID NOs: 12-18. In some cases, a subject nucleic acid includes a promoter that includes a nucleotide sequence with the promoter sequence set forth in any of SEQ ID NOs: 1-7 and 381-387; and a nucleotide sequence, encoding an RBS, with the nucleotide sequence set forth in any of SEQ ID NOs: 12-18.

[0148] In some cases, a subject nucleic acid includes a promoter that includes a nucleotide sequence having 75% or more identity (e.g., 80% or more, 85% or more, 90% or more, 95% or more, 98% or more, 99% or more, 99.5% or more, 99.8% or more, or 100% identity) with the promoter sequence set forth in any of SEQ ID NOs: 2-8, 151-364, and 382-388; and a nucleotide sequence, encoding an RBS, having 75% or more identity (e.g., 80% or more, 85% or more, 90% or more, 95% or more, 98% or more, 99% or more, 99.5% or more, 99.8% or more, or 100% identity) with the nucleotide sequence set forth in any of SEQ ID NOs: 10-18. In some cases, a subject nucleic acid includes a promoter that includes a nucleotide sequence with the promoter sequence set forth in any of SEQ ID NOs: 2-8, 151-364, and 382-388; and a nucleotide sequence, encoding an RBS, with the nucleotide sequence set forth in any of SEQ ID NOs: 10-18.

[0149] In some cases, a subject nucleic acid includes a promoter that includes a nucleotide sequence having 75% or more identity (e.g., 80% or more, 85% or more, 90% or more, 95% or more, 98% or more, 99% or more, 99.5% or more, 99.8% or more, or 100% identity) with the promoter sequence set forth in any of SEQ ID NOs: 2-8, 151-364, and 382-388; and a nucleotide sequence, encoding an RBS, having 75% or more identity (e.g., 80% or more, 85% or more, 90% or more, 95% or more, 98% or more, 99% or more, 99.5% or more, 99.8% or more, or 100% identity) with the nucleotide sequence set forth in any of SEQ ID NOs: 11-18. In some cases, a subject nucleic acid includes a promoter that includes a nucleotide sequence with the promoter sequence set forth in any of SEQ ID NOs: 2-8, 151-364, and 382-388; and a nucleotide sequence, encoding an RBS, with the nucleotide sequence set forth in any of SEQ ID NOs: 11-18.

[0150] In some cases, a subject nucleic acid includes a promoter that includes a nucleotide sequence having 75% or more identity (e.g., 80% or more, 85% or more, 90% or more, 95% or more, 98% or more, 99% or more, 99.5% or more, 99.8% or more, or 100% identity) with the promoter sequence set forth in any of SEQ ID NOs: 2-8, 151-364, and 382-388; and a nucleotide sequence, encoding an RBS, having 75% or more identity (e.g., 80% or more, 85% or more, 90% or more, 95% or more, 98% or more, 99% or more, 99.5% or more, 99.8% or more, or 100% identity) with the nucleotide sequence set forth in any of SEQ ID NOs: 12-18. In some cases, a subject nucleic acid includes a promoter that includes a nucleotide sequence with the promoter sequence set forth in any of SEQ ID NOs: 2-8, 151-364, and 382-388; and a nucleotide sequence, encoding an RBS, with the nucleotide sequence set forth in any of SEQ ID NOs: 12-18.

[0151] In some cases, a subject nucleic acid includes a promoter that includes a nucleotide sequence having 75% or more identity (e.g., 80% or more, 85% or more, 90% or more, 95% or more, 98% or more, 99% or more, 99.5% or more, 99.8% or more, or 100% identity) with the promoter sequence set forth in any of SEQ ID NOs: 1-7, 151-364, and 381-387; and a nucleotide sequence, encoding an RBS, having 75% or more identity (e.g., 80% or more, 85% or more, 90% or more, 95% or more, 98% or more, 99% or more, 99.5% or more, 99.8% or more, or 100% identity) with the nucleotide sequence set forth in any of SEQ ID NOs: 10-18. In some cases, a subject nucleic acid includes a promoter that includes a nucleotide sequence with the promoter sequence set forth in any of SEQ ID NOs: 1-7, 151-364, and 381-387; and a nucleotide sequence, encoding an RBS, with the nucleotide sequence set forth in any of SEQ ID NOs: 10-18.

[0152] In some cases, a subject nucleic acid includes a promoter that includes a nucleotide sequence having 75% or more identity (e.g., 80% or more, 85% or more, 90% or more, 95% or more, 98% or more, 99% or more, 99.5% or more, 99.8% or more, or 100% identity) with the promoter sequence set forth in any of SEQ ID NOs: 1-7, 151-364, and 381-387; and a nucleotide sequence, encoding an RBS, having 75% or more identity (e.g., 80% or more, 85% or more, 90% or more, 95% or more, 98% or more, 99% or more, 99.5% or more, 99.8% or more, or 100% identity) with the nucleotide sequence set forth in any of SEQ ID NOs: 11-18. In some cases, a subject nucleic acid includes a promoter that includes a nucleotide sequence with the promoter sequence set forth in any of SEQ ID NOs: 1-7, 151-364, and 381-387; and a nucleotide sequence, encoding an RBS, with the nucleotide sequence set forth in any of SEQ ID NOs: 11-18.

[0153] In some cases, a subject nucleic acid includes a promoter that includes a nucleotide sequence having 75% or more identity (e.g., 80% or more, 85% or more, 90% or more, 95% or more, 98% or more, 99% or more, 99.5% or more, 99.8% or more, or 100% identity) with the promoter sequence set forth in any of SEQ ID NOs: 1-7, 151-364, and 381-387; and a nucleotide sequence, encoding an RBS, having 75% or more identity (e.g., 80% or more, 85% or more, 90% or more, 95% or more, 98% or more, 99% or more, 99.5% or more, 99.8% or more, or 100% identity) with the nucleotide sequence set forth in any of SEQ ID NOs: 12-18. In some cases, a subject nucleic acid includes a promoter that includes a nucleotide sequence with the promoter sequence set forth in any of SEQ ID NOs: 1-7, 151-364, and 381-387; and a nucleotide sequence, encoding an RBS, with the nucleotide sequence set forth in any of SEQ ID NOs: 12-18.

[0154] In some cases, a subject nucleic acid includes a promoter that includes a nucleotide sequence having 75% or more identity (e.g., 80% or more, 85% or more, 90% or more, 95% or more, 98% or more, 99% or more, 99.5% or more, 99.8% or more, or 100% identity) with the promoter sequence set forth in any of SEQ ID NOs: 1-8, 151-364, and 381-388; and a nucleotide sequence, encoding an RBS, having 75% or more identity (e.g., 80% or more, 85% or more, 90% or more, 95% or more, 98% or more, 99% or more, 99.5% or more, 99.8% or more, or 100% identity) with the nucleotide sequence set forth in any of SEQ ID NOs: 10-18. In some cases, a subject nucleic acid includes a promoter that includes a nucleotide sequence with the promoter sequence set forth in any of SEQ ID NOs: 1-8, 151-364, and 381-388; and a nucleotide sequence, encoding an RBS, with the nucleotide sequence set forth in any of SEQ ID NOs: 10-18.

[0155] In some cases, a subject nucleic acid includes a promoter that includes a nucleotide sequence having 75% or more identity (e.g., 80% or more, 85% or more, 90% or more, 95% or more, 98% or more, 99% or more, 99.5% or more, 99.8% or more, or 100% identity) with the promoter sequence set forth in any of SEQ ID NOs: 1-8, 151-364, and 381-388; and a nucleotide sequence, encoding an RBS, having 75% or more identity (e.g., 80% or more, 85% or more, 90% or more, 95% or more, 98% or more, 99% or more, 99.5% or more, 99.8% or more, or 100% identity) with the nucleotide sequence set forth in any of SEQ ID NOs: 11-18. In some cases, a subject nucleic acid includes a promoter that includes a nucleotide sequence with the promoter sequence set forth in any of SEQ ID NOs: 1-8, 151-364, and 381-388; and a nucleotide sequence, encoding an RBS, with the nucleotide sequence set forth in any of SEQ ID NOs: 11-18.

[0156] In some cases, a subject nucleic acid includes a promoter that includes a nucleotide sequence having 75% or more identity (e.g., 80% or more, 85% or more, 90% or more, 95% or more, 98% or more, 99% or more, 99.5% or more, 99.8% or more, or 100% identity) with the promoter sequence set forth in any of SEQ ID NOs: 1-8, 151-364, and 381-388; and a nucleotide sequence, encoding an RBS, having 75% or more identity (e.g., 80% or more, 85% or more, 90% or more, 95% or more, 98% or more, 99% or more, 99.5% or more, 99.8% or more, or 100% identity) with the nucleotide sequence set forth in any of SEQ ID NOs: 12-18. In some cases, a subject nucleic acid includes a promoter that includes a nucleotide sequence with the promoter sequence set forth in any of SEQ ID NOs: 1-8, 151-364, and 381-388; and a nucleotide sequence, encoding an RBS, with the nucleotide sequence set forth in any of SEQ ID NOs: 12-18.

[0157] In some cases, a subject nucleic acid includes a nucleotide sequence having the sequence of the promoter/RBS combination set forth in any of SEQ ID NOs: 20-83. In some cases, a subject nucleic acid includes a nucleotide sequence having the sequence of the promoter/RBS combination set forth in any of SEQ ID NOs: 28-83.

### Nucleotide Sequence of Interest

[0158] As noted above, provided are nucleic acids (e.g., expression vectors) that include a promoter sequence operably linked to a nucleotide sequence of interest. A nucleotide sequence of interest of a subject nucleic acid is operably linked to a promoter. The terms “operably linked” and “operable linkage” as used herein refer to a juxtaposition wherein the components so described are in a relationship permitting them to function in their intended manner. For instance, a promoter is operably linked to a nucleotide sequence if the promoter affects the transcription and/or expression of the nucleotide sequence. As another example, a ribosomal binding site (RBS) (e.g., a Shine Dalgarno sequence, a synthetic RBS, and the like) is a site in an mRNA that facilitates the translation of the mRNA into protein. Thus, a subject nucleotide sequence of interest (e.g. one encoding an mRNA, i.e., one encoding a protein) is operably linked to a sequence encoding an RBS if, once transcribed into RNA, the RBS affects the translation of the transcribed nucleotide sequence of interest. Therefore, a sequence encoding an RBS can be operably linked to both a promoter and a nucleotide sequence of interest if the nucleotide sequence of interest is also operably linked to the same promoter. In other words, a promoter can be operably linked to both a sequence encoding an RBS and to a nucleotide sequence of interest, the sequence encoding the RBS can be operably linked to both the promoter and the nucleotide sequence of interest, and the nucleotide sequence of interest can be operably linked to both the promoter and the sequence encoding the RBS.

[0159] As used herein, for the purposes of this disclosure, it is equivalent to say that a ‘nucleotide sequence is operably linked to a promoter’ and to say that the ‘promoter is operably linked to the nucleotide sequence’ (or to say that the two are in operable linkage with one another). Likewise, it is equivalent to say that a ‘nucleotide sequence is operably linked to a sequence encoding an RBS’ and to say that the ‘sequence encoding an RBS is operably linked to the nucleotide sequence’ (or to say that the two sequences are in operable linkage with one another).

[0160] A nucleotide sequence of interest can be any nucleotide sequence as long as the sequence is heterologous to the promoter to which it is operably linked. The term “heterologous,” e.g., with respect to a heterologous nucleotide sequence, is a relative term referring to a nucleotide sequence (e.g., a nucleotide sequence of interest) that is related to another nucleotide sequence (e.g., a promoter) in a manner so that the two sequences are not arranged in the same relationship to each other as in nature. Heterologous nucleotide sequences include, e.g., a heterologous nucleotide sequence operably linked to a promoter, and a nucleic including a native promoter that is inserted into a heterologous vector (e.g., for introduction into a cell). Two heterologous nucleotide sequences (e.g., a nucleotide sequence operably linked to a promoter) can originate from different sources (e.g., one from a phage and one from a cell) or from the same source (e.g., both from a phage or both from a cell). Thus, when a subject nucleotide sequence of interest is heterologous to the promoter to which it is operably linked, the nucleotide sequence of interest is a sequence that is not found in nature in operable linkage with the promoter. In other words, the combination of promoter and nucleotide sequence of interest of a subject nucleic acid is a combination that is not naturally occurring.

[0161] Transgenes

[0162] Examples of nucleotide sequences of interest include but are not limited to transgene sequences and insertion sites. For example, in some cases, a nucleotide sequence of interest is a transgene (e.g., a transgene that encodes a protein, a transgene that encodes a non-coding RNA, a transgene that encodes a coding RNA, i.e., an mRNA). As used herein, the term “transgene” can be used to refer to a nucleotide sequence of interest that (i) is operably linked to a promoter (e.g., a promoter functional in prokaryotic cells, e.g., Bacteroides cells), (ii) encodes an expression product (e.g., protein, mRNA, non-coding RNA), and (iii) is capable of being expressed in a target cell (e.g., a prokaryotic cell such as a Bacteroides cell). Non-limiting examples of transgenes include nucleotide sequences that encode a peptide or polypeptide (i.e., protein coding sequences, mRNA sequences), and nucleotide sequences that encode non-translated RNAs (non-coding RNA, ncRNA) (e.g., a guide RNA for a genome editing protein such as a CRISPR/Cas protein like Cas9; an RNA such as antisense RNA, siRNA, shRNA, and miRNA; and the like). In some cases, a transgene is operably linked to a promoter functional in prokaryotic cells (e.g., Bacteroides cells).

[0163] In some cases, a transgene is a “marker” or “marker gene” or “marker protein.” A marker is an expression product (e.g., mRNA, protein, non-coding RNA) that marks a host cell such that the host cell is detectable (e.g., detectably labeled). In some cases, the host cell is detectable by virtue of survival (e.g., the marker can be a “selectable marker”). In some cases, the host cell is detectable by observation (e.g., by direct visualization, by performing an assay, by performing a measurement step, and the like) and the marker can be referred to as a “reporter” or “reporter gene” or “reporter protein.”

[0164] As noted above, some markers are “selectable markers.” Selectable markers (a “selectable marker gene” can encode a “selectable marker protein”) provide for selection, i.e., for selective retention of cells (e.g., prokaryotic cells) that comprise the selectable marker gene, during culturing and propagation of the cells. An example of a selectable marker is a transgene that encodes a drug selectable marker protein that provides drug resistance for prokaryotic cells (e.g., Bacteroides cells). Such a selectable marker encodes a drug selectable marker protein that provides resistance for prokaryotic cells to one or more drugs (e.g., kanamycin, neomycin, ampicillin, carbenicillin, chloramphenicol, gentamicin, tetracycline, rifampin, trimethoprim, hygromycin B, spectinomycin, and the like). Proteins that provide drug resistance to cells (e.g., prokaryotic cells) in which they are expressed are known in the art. For example, wild type genes/proteins are known that provide resistance (e.g., for prokaryotic cells) to the above drugs. For example, aminoglycoside 3′-phosphotransferase (APH), is a wild type protein that provides for resistance to the drugs Kanamycin, Neomycin and Geneticin (G418); while beta-lactamase is a wild type protein that provides for resistance to the drugs ampicillin and carbenecillin. Chloramphenicol acetyltransferase (cat) confers resistance to chloramphenicol. Genes conferring resistance to aminoglycosides include aac, aad, aph and strA/B. Genes conferring resistance to β-lactams include ampC, cmy, tem and vim. Genes conferring resistance to sulfonamides include sull and sullI. Genes conferring resistance to tetracycline include tet(A), tet(B), tet(C), tet(D) and regulator, and tetR. Selectable markers can also be those useful in balanced lethal systems, e.g., in which an essential gene is maintained on a plasmid with a corresponding chromosomal deletion or suppressible mutation on the host cell genome, e.g. a tRNA selectable marker that suppresses a host chromosomal gene mutation; those useful in repressor titration systems, in which an operator sequences, e.g. the lac operator or tet operator, placed on a plasmid, derepresses a chromosomal gene; antidote/poison selection schemes, in which an antidote to a poison expressed from the host chromosome (e.g. the ccdB gene) is maintained on the plasmid; and those useful in RNA-based selection schemes, e.g. antisense regulators, or antisense regulators that inhibit the translation of a gene transcribed from the host chromosome that would otherwise promote cell death.

[0165] Also as noted above, some markers are “reporters” or “reporter genes” or “reporter proteins.” A “reporter” is a marker that provides an identifiable characteristic (trait) to a cell that expresses the reporter such that the cell can be identified relative to cells not expressing the reporter. A reporter is detectable by observation (e.g., by direct visualization, by performing an assay, by performing a measurement step, and the like). For example, a fluorescent protein such as GFP (green fluorescent protein) can be considered a reporter because those cells that express the gene encoding GFP can be readily identified relative to those cells not expressing GFP. Likewise, an enzyme such as luciferase can be considered a reporter because those cells that express the gene encoding luciferase can be readily identified relative to those cells not expressing luciferase (e.g., by performing an assay in which a substrate for luciferase is converted by luciferase into a detectable product).

[0166] In some cases, a transgene is an enzyme (e.g., a metabolic enzyme). For example, there are many small molecules produced by microbes in the gut that accumulate in the blood and cause or exacerbate diseases. Expressing an enzyme or a pathway (as a transgene) in a Bacteroides cell (or population of cells) to break down these products can be used in methods of treatment. For example, a Bacteroides cell expressing such a transgene can be introduced into the gut of an individual (e.g., in order to break down small molecules produced by microbes to reduce or even eliminate the amount absorbed by the gut of the individual, reducing the accumulation of the molecules in the blood of the individual). As an illustration that this is achievable (e.g., as proof of principle) see, e.g., FIG. 2e-2f and FIG. 3a of the working examples below, in which luciferase (an enzyme) was expressed and functional in Bacteroides that were introduced into the gut of an animal.

[0167] Secreted Fusion Proteins

[0168] In some embodiments, a transgene encodes a secreted protein (e.g., a therapeutic protein). For example, in some cases, a transgene is a secreted fusion protein that includes a polypeptide of interest and a secreted Bacteroides polypeptide (or secreted variant and/or fragment thereof). As used herein, the term “secreted” when referring to a protein product of a subject transgene, encompasses any route of being added into the extracellular environment. For example, in some cases, a subject polypeptide of interest is secreted by virtue of being fused to a secreted Bacteroides protein (e.g., BT0525)(e.g., see FIG. 23) that is secreted through the outer membrane. However, in some cases, a subject polypeptide of interest is secreted by virtue of being fused to a secreted Bacteroides protein (e.g., BT1488, SEQ ID NO: 484) that is released from outer membrane vesicles (see, e.g., Elhenawy et al, MBio. 2014 Mar. 11; 5(2); Hickey et al, Cell Host Microbe. 2015 May 13:17(5):672-80; and Shen et al, Cell Host Microbe. 2012 Oct. 18; 12(4):509-20). For example, in some cases, the outer-membrane buds off into small vesicles containing protein. Proteins secreted this way would be protected from degradation by gut proteases, and could also be delivered to the mammalian cell cytoplasm when those vesicles fuse to the cell membrane. Thus, in some cases the fusion protein is secreted through the outer membrane (e.g. when fused to BT0525), and in some cases the fusion protein is released from outer-membrane vesicles (e.g. when fused to BT1488), e.g., see FIG. 22.

[0169] The sequence of BT1488 is:

(SEQ ID NO: 484)
MAIAATILASCNKDEEETEIQGFKVLEYRPAPGQFINEGFDCQTMEEANA
YAEERFNKKLYVSLGSFGGYITVKMPKEIKNRKGYDFGIIGNPFSGSSEP
GIVWVSEDANGNGKADDVWYELKGSDEPERDYSVTYHRPDAAGDIPWED
NKGESGIIKYLPQYHDQMYYPNWIKEDSYTLKGSMLEARTEQEGGIWKNK
DFGKGYADNWGSDMAKDDNGNYRYNQFDLDDAVDQNGNPVTLERIHFV
KVQSAILKNVESIGEVSTEVVGFKAF

The term “secreted Bacteroides polypeptide” as used herein is meant to encompass any type of secretion, including those described in this paragraph.

[0170] As described in the examples section below, proteins were identified that are secreted by Bacteroides cells (e.g., see FIG. 17a-17e and FIG. 18a-18b). Provided herein are fusion proteins in which a polypeptide of interest is fused to a secreted Bacteroides protein or to a secreted variant (e.g., fragment) thereof. Examples of secreted Bacteroides proteins include but are not limited to those presented in FIG. 19 (SEQ ID NOs: 458-484). This list includes a set of proteins that were identified using proteomic data to be significantly over-represented in the supernatant (i.e. secreted) compared to what would be expected from a cell pellet (i.e. not-secreted) from B. thetaiotaomicron cultures. (e.g., see FIG. 17a). As such, a polypeptide of interest can be fused to any one of the proteins set forth in SEQ ID NOs: 458-484, or to a secreted variant (e.g., sequence variant, fragment, etc.) thereof. While the amino acid sequences set forth in SEQ ID NOs: 458-484 are full length protein sequences, one of ordinary skill in the art using routine and conventional techniques would be readily able to identify fragments and/or variants thereof that are also secreted. As would be recognized by one of ordinary skill in the art, because the purpose of fusing a polypeptide of interest (e.g., by fusing a nucleotide sequence encoding a polypeptide of interest to a nucleotide sequence encoding a secreted Bacteroides protein) to a secreted Bacteroides protein is to use the secreted Bacteroides protein as a carrier to deliver the polypeptide of interest into the extracellular space, the exact sequence and/or length of the secreted Bacteroides protein (or fragment thereof) is not crucial.

[0171] Thus, when using the terms “secreted Bacteroides protein” and “secreted Bacteroides polypeptide” herein, it is meant any protein (e.g., including any full length protein, variant, and/or fragment thereof) that is secreted by a Bacteroides cell into the extracellular space (e.g., via outer membrane vesicle release, via secretion across the outer membrane). As such, the terms encompass fusion proteins that include the entire full length sequence of a secreted Bacteroides protein (e.g., a naturally secreted Bacteroides protein), but also encompass fusion proteins that include secreted variants and/or secreted fragments of a secreted Bacteroides protein.

[0172] As noted above, in some cases, the secreted Bacteroides protein of a subject fusion protein includes the amino acid sequence set forth in any one of SEQ ID NOs: 458-484, or is a secreted variant and/or fragment thereof. In some cases, the secreted Bacteroides protein of a subject fusion protein is BT0525 (SEQ ID NO: 459) (or a secreted variant and/or secreted fragment thereof). Thus, in some cases, the secreted Bacteroides protein of a subject fusion protein is a secreted variant and/or a secreted fragment of BT0525 (SEQ ID NO: 459). In some cases the fusion protein is secreted through the outer membrane (e.g. when fused to BT0525). In some cases the fusion protein is released from outer-membrane vesicles (e.g. when fused to BT1488, SEQ ID NO: 484) (e.g., see FIG. 22).

[0173] In some cases, a secreted Bacteroides protein of a subject secreted fusion protein has an amino acid sequence having 80% or more (85% or more, 90% or more, 92% or more, 95% or more, 98% or more, 99% or more, 99.5% or more, or 100%) sequence identity with the amino acid sequence set forth in any of SEQ ID NOs: 458-484. In some cases, a secreted Bacteroides protein of a subject secreted fusion protein has an amino acid sequence having 80% or more (85% or more, 90% or more, 92% or more, 95% or more, 98% or more, 99% or more, 99.5% or more, or 100%) sequence identity with the amino acid sequence set forth in any of SEQ ID NOs: 458-484 over a stretch of 20 or more amino acids. In some cases, a secreted Bacteroides protein of a subject secreted fusion protein has an amino acid sequence having 80% or more (85% or more, 90% or more, 92% or more, 95% or more, 98% or more, 99% or more, 99.5% or more, or 100%) sequence identity with the amino acid sequence set forth in SEQ ID NOs: 459. In some cases, a secreted Bacteroides protein of a subject secreted fusion protein has an amino acid sequence having 80% or more (85% or more, 90% or more, 92% or more, 95% or more, 98% or more, 99% or more, 99.5% or more, or 100%) sequence identity with the amino acid sequence set forth in SEQ ID NOs: 459 over a stretch of 20 or more amino acids.

[0174] The polypeptide of interest of a subject secreted fusion protein can be any polypeptide. In some cases, the polypeptide of interest is a therapeutic peptide (e.g., a metabolic enzyme or a peptide that can, when secreted from a Bacteroides cell, e.g., in the gut of an individual, have a positive impact on a clinical parameter of the individual). For example, see below for methods of delivering and for methods of treating. Examples of therapeutic peptides include but are not limited to metabolic enzymes (e.g., as discussed elsewhere herein) and anti-inflammatory peptides, which can include but are not limited to those presented in Table 8 (SEQ ID NOs: 411-417). In some cases, the polypeptide of interest includes an amino acid sequence selected from: RYTVELA (SEQ ID NO: 411)(Peptide 101.10), VTLVGNTFLQSTINRTIGVL (SEQ ID NO: 412)(Fp MAM-pep5), and MQPPGC (SEQ ID NO: 413)(CD80-CAP1). In some cases, the polypeptide of interest includes an amino acid sequence selected from: RYTVELA (SEQ ID NO: 411)(Peptide 101.10), and VTLVGNTFLQSTINRTIGVL (SEQ ID NO: 412)(Fp MAM-pep5). In some cases, the polypeptide of interest includes the amino acid sequence RYTVELA (SEQ ID NO: 411)(Peptide 101.10). In some cases, the polypeptide of interest includes the amino acid sequence VTLVGNTFLQSTINRTIGVL (SEQ ID NO: 412)(Fp MAM-pep5).

TABLE 8
Examples of therapeutic peptides (polypeptides of
interested) that can be fused to a secreted
Bacteroides protein to form a subject secreted
fusion protein.

| | | SEQ | |
|---|---|---|---|
| | | ID | |
| Peptide | AA sequence | NO | Type |
| 101.10 | RYTVELA | 411 | IL-1 inhibitory |
| | | | peptides |
| Fp MAM- | VTLVGNTFLQSTINRTIGVL | 412 | anti-NF-KB |
| pep5 | | | |
| CD80- | MQPPGC | 413 | CD80 antagonistoc |
| CAP1 | | | peptide |
| Pep2305 | TEEEQQLY | 414 | IL-23 inhibitory |
| | | | peptides |
| KPV | KPV | 415 | NF-kB and MAPK |
| | | | inhibition |
| WP9QY | YCWSQYLCY | 416 | anti-TNF |
| P144 | TSLDASIIWAMMQN | 417 | TGF-b inhibitory |
| | | | peptide |

[0175] In some embodiments, a subject secreted fusion protein includes more than one polypeptide of interest (e.g., two or more, three or more, or four or more polypeptides of interest). In some such cases, the polypeptides of interest can be separated by linkers (e.g., cleavable linkers).

[0176] A subject polypeptide of interest of a fusion protein can have any desirable length. For example, in the case of a secreted fusion protein, the polypeptide of interest can have any desirable length as long as the polypeptide of interest is secreted from the cell (e.g., secreted as part of the fusion protein and in some cases separated from the fusion after secretion via cleavage of a linker, secreted by the cell after cleavage of a cleavable linker, and the like). In some embodiments, a polypeptide of interest has a length of 2 amino acids or more (e.g., 3 amino acids or more, 5 amino acids or more, 6 amino acids or more, 7 amino acids or more, or 10 amino acids or more). In some cases, a polypeptide of interest has a length in a range of from 2 to 1000 amino acids (e.g., 2 to 500, 2 to 300, 2 to 200, 2 to 100, 2 to 75, 2 to 50, 2 to 30, 2 to 25, 2 to 20, 3 to 1000, 3 to 500, 3 to 300, 3 to 200, 3 to 100, 3 to 75, 3 to 50, 3 to 30, 3 to 25, 3 to 20, 5 to 1000, 5 to 500, 5 to 300, 5 to 200, 5 to 100, 5 to 75, 5 to 50, 5 to 30, 5 to 25, or 5 to 20 amino acids). In some cases, a polypeptide of interest has a length in a range of from 3 to 50 amino acids (e.g., 3 to 30, 3 to 25, 3 to 20, 5 to 50, 5 to 30, 5 to 25, or 5 to 20 amino acids). In some cases, a polypeptide of interest has a length in a range of from 6 to 40 amino acids (e.g., 6 to 30, 6 to 25, 6 to 20, 7 to 40, 7 to 30, 7 to 25, or 7 to 20 amino acids).

[0177] In some cases, the polypeptide of interest (e.g., therapeutic peptide) of a subject secreted fusion protein is fused to a secreted Bacteroides protein (or secreted variant and/or fragment thereof) via a linker (i.e., a linker is positioned between the secreted Bacteroides protein and the polypeptide of interest). Thus, in some cases, a subject fusion protein includes a linker and a secreted Bacteroides protein fused to a heterologous polypeptide of interest, where the linker is positioned between the secreted Bacteroides protein and the polypeptide of interest. In some cases, the linker is a cleavable linker. In some cases, a cleavable linker is a self-cleaving linker (e.g., a 2A peptide, an intein, etc.). In some such cases a cleavable linker is cleavable by one or more gut proteases. When a subject secreted fusion protein includes a polypeptide of interest (e.g., therapeutic peptide) fused to a secreted Bacteroides protein (or secreted variant and/or fragment thereof) via a linker that is cleavable by one or more gut proteases, the polypeptide of interest will be released from the secreted Bacteroides protein only after secretion and only when the extracellular environment (e.g., an animal gut) includes an appropriate corresponding protease.

[0178] In some cases, a cleavable linker is cleavable by one or more host cell proteases (e.g., proteases of a Bacteroides cell or proteases of a cell of the host animal's gut) (e.g., an extracellular protease such as a matrix metalloproteinase, or an endopeptidase-2; an intracellular protease such as a cysteine protease or a seine protease; and the like). As an illustrative example, a subject polypeptide of interest can be fused to a secreted Bacteroides protein such that the fusion protein is incorporated into outer membrane vesicles (OMVs) that are released from the Bacteroides cell and then fuse with a host animal's cell, thus delivering the polypeptide of interest into the cytoplasm of a host animal's cell. In this scenario, a cleavable linker can be cleavable by a eukaryotic cytoplasmic protease. When a subject secreted fusion protein includes a polypeptide of interest (e.g., therapeutic peptide) fused to a secreted Bacteroides protein (or secreted variant and/or fragment thereof) via a linker that is cleavable by one or more host cell proteases (e.g., an extracellular and/or intracellular host cell protease), the polypeptide of interest will be released from the secreted Bacteroides protein only after secretion and only when the environment (e.g., animal cell's cytoplasm) includes an appropriate corresponding protease.

[0179] Any convenient cleavable linker can be used and may ‘target’ gut proteases (and their corresponding cleavable linker sequences) will be known to one of ordinary skill in the art. Examples of gut proteases include but are not limited to those listed in Table 9. Thus, in some cases, a cleavable linker of a subject secreted fusion protein is cleavable by one or more gut proteases (also referred to herein as target peptidases) selected from: a trypsin, a chymotrypsin, and an elastase. In some cases, a cleavable linker of a subject secreted fusion protein is cleavable by one or more gut proteases selected from: chymotrypsin-like elastase family member 2A, anionic trypsin-2, chymotrypsin-C, chymotrypsinogen B, elastase 1, and elastase 3. In some cases, a cleavable linker of a subject secreted fusion protein is cleavable by one or more gut proteases selected from: trypsin, chymotrypsin (e.g., chymotrypsin B), and elastase (e.g., elastase 1, elastase 3). In some cases, a cleavable linker of a subject secreted fusion protein is cleavable by one or more gut proteases selected from trypsin, chymotrypsin, chymotrypsin B, and elastase (e.g., elastase 1, elastase 3).

TABLE 9
Gut Enzymes and cleavage preferences

| Target gut proteases | Uniprot: Preferential cleavage |
|---|---|
| Chymotrypsin-like elastase | Leu (L), Met (M) and Phe (F) |
| family member 2A | |
| Anionic trypsin-2 | Arg (R), Lys (K). |
| Chymotrypsin-C | Leu (L), Tyr (Y), Phe (F), Met (M), |
| | Trp (W), Gln (Q), Asn (N). |
| Chymotrypsinogen B | Tyr (Y), Trp (W), Phe (F), Leu (L) |
| Elastase 1 | Ala (A) |
| Elastase 3 | Ala (A) |

[0180] A linker (e.g., cleavable linker) can have any convenient length. In some cases, a linker is 2 or more amino acids in length (e.g.,) In some embodiments, a linker (e.g., cleavable linker) has a length of 2 amino acids or more (e.g., 3 amino acids or more, 5 amino acids or more, 6 amino acids or more, 7 amino acids or more, or 10 amino acids or more). In some cases, a linker (e.g., cleavable linker) has a length in a range of from 2 to 50 amino acids (e.g., 2 to 30, 2 to 25, 2 to 20, 2 to 15, 2 to 10, 2 to 8, 3 to 50, 3 to 30, 3 to 25, 3 to 20, 3 to 15, 3 to 10, 3 to 8, 5 to 50, 5 to 30, 5 to 25, or 5 to 20, 5 to 15, 5 to 10, 5 to 8, 8 to 50, 8 to 30, 8 to 25, or 8 to 20, 8 to 15, or 8 to 10 amino acids). In some cases, a linker (e.g., cleavable linker) has a length in a range of from 4 to 20 amino acids (e.g., 5 to 20, 5 to 15, 5 to 10, 5 to 8, 8 to 20, 8 to 15, or 8 to 10 amino acids).

[0181] A cleavable linker can include one or more (e.g., 2 or more, 3 or more, 4 or more, or 5 or more) non-cleavable amino acids followed by a cleavable amino acid. In some cases, a cleavable linker includes in a range of from 2 to 50 non-cleavable amino acids (e.g., 2 to 25, 2 to 20, 2 to 15, 2 to 10, 2 to 8, 2 to 5, 5 to 50, 5 to 25, 5 to 20, 5 to 15, 5 to 10, or 5 to 8 non-cleavable amino acids) followed by a cleavable amino acid. In some cases, a cleavable linker includes in a range of from 2 to 10 non-cleavable amino acids (e.g., 2 to 8, 2 to 5, 5 to 10, or 5 to 8 non-cleavable amino acids) followed by a cleavable amino acid.

[0182] In some cases the one or more (e.g., 2 or more, 3 or more, 4 or more, or 5 or more) non-cleavable amino acids are selected from S, G, T, P, M, H, A, D, E, N, and V. In some cases the one or more (e.g., 2 or more, 3 or more, 4 or more, or 5 or more) non-cleavable amino acids are selected from S, G, T, P, M, H, and A. In some cases the one or more (e.g., 2 or more, 3 or more, 4 or more, or 5 or more) non-cleavable amino acids are selected from S, G, T, P, and A.

[0183] In some cases, the cleavable amino acid is selected from R, L, F, A, K, M, W, Q, Y, and L. In some cases, the cleavable amino acid is selected from R, L, F, and A.

[0184] In some cases, a cleavable linker includes one or more (e.g., 2 or more, 3 or more, 4 or more, or 5 or more) non-cleavable amino acids selected from S, G, T, P, M, H, A, D, E, N, and V followed by a cleavable amino acid selected from: R, L, F, A, K, M, W, Q, Y, and L. In some cases, a cleavable linker includes one or more (e.g., 2 or more, 3 or more, 4 or more, or 5 or more) non-cleavable amino acids selected from S, G, T, P, M, H, and A followed by a cleavable amino acid selected from: R, L, F, A, K, M, W, Q, Y, and L. In some cases, a cleavable linker includes one or more (e.g., 2 or more, 3 or more, 4 or more, or 5 or more) non-cleavable amino acids selected from S, G, T, P, and A followed by a cleavable amino acid selected from: R, L, F, A, K, M, W, Q, Y, and L. In some cases, a cleavable linker includes one or more (e.g., 2 or more, 3 or more, 4 or more, or 5 or more) non-cleavable amino acids selected from S, G, T, P, M, H, A, D, E, N, and V followed by a cleavable amino acid selected from: R, L, F, and A. In some cases, a cleavable linker includes one or more (e.g., 2 or more, 3 or more, 4 or more, or 5 or more) non-cleavable amino acids selected from S, G, T, P, M, H, and A followed by a cleavable amino acid selected from: R, L, F, and A. In some cases, a cleavable linker includes one or more (e.g., 2 or more, 3 or more, 4 or more, or 5 or more) non-cleavable amino acids selected from S, G, T, P, and A followed by a cleavable amino acid selected from: R, L, F, and A. In some cases, a cleavable linker includes one or more (e.g., 2 or more, 3 or more, 4 or more, or 5 or more) non-cleavable amino acids selected from 8, G, T, P, and A followed by a P followed by a cleavable amino acid selected from: R, L, F, and A (e.g., followed by a P followed by an F).

[0185] Motifs for various gut proteases are known in the art. For example, a motif for Chymotrypsin is A; followed by A; followed by a P or a V; followed by an FYL, or W. Examples of suitable cleavable linkers include, but are not limited to those presented in Table 11. Additional examples of suitable cleavable linkers include, but are not limited to, those presented in Table 11. Additional examples of suitable cleavable linkers include, but are not limited to, those that include one or more (e.g., 2 or more, 3 or more, 4 or more, or 5 or more) non-cleavable amino acids (e.g., selected from S, G, T, P, and A) followed by any one of the sequences set forth in SEQ ID NOs: 427-453. In some cases, a cleavable linker includes an amino acid sequence selected from the sequences set forth in SEQ ID NOs: 427-453. In some cases, a cleavable linker includes the amino acid sequence TAPF (SEQ ID NO: 433).

TABLE 10
Examples of cleavable linker sequences and their
target peptidase

| | Amino acid sequence | | SEQ |
|---|---|---|---|
| | (cleavage at bold | | ID |
| Linkers | amino acid | Target peptidase | NO: |
| CL1 | SGPTGHGR | Trypsin | 422 |
| CL2 | SGPTGMAR | Trypsin | 423 |
| CL3 | SGPTASPL | Chymotrypsin | 424 |
| CL4 | SGPTTAPF | Chymotrypsin B | 425 |
| CL5 | SGPTAAPA | Elastase 1 | 426 |

[0186] Insertion Sites

[0187] In some cases, a nucleotide sequence of interest of a subject nucleic acid (e.g., a vector such as a plasmid) is an insertion site. In some cases as subject nucleic acid of interested includes an insertion site in addition to a second nucleotide sequence of interest, such as any of those described above (e.g., a transgene, a sequence encoding a fusion protein, etc.). An insertion site is a nucleotide sequence used for the insertion of a desired sequence. For example, an insertion site can be a sequence in the nucleic acid at which a transgene sequence will later be inserted. “Insertion sites” for use with various technologies are known to those of ordinary skill in the art and any convenient insertion site can be used. An insertion site can be for any method for manipulating nucleic acid sequences. For example, in some cases the insertion site is a multiple cloning site (MCS) (e.g., a site including one or more restriction enzyme recognition sequences), a site for ligation independent cloning, a site for recombination based cloning (e.g., recombination based on aft sites), a nucleotide sequence recognized by a CRISPR/Cas (e.g. Cas9) based technology, and the like.

[0188] An insertion site can be any desirable length, and can depend on the type of insertion sites (e.g., can depend on whether (and how many) the site includes one or more restriction enzyme recognition sequences, whether the site includes a target site for a CRISPR/Cas protein, etc.). In some cases, an insertion site of a subject nucleic acid is 3 or more nucleotides (nt) in length (e.g., 5 or more, 8 or more, 10 or more, 15 or more, 17 or more, 18 or more, 19 or more, 20 or more or 25 or more, or 30 or more nt in length). In some cases, the length of an insertion site of a subject nucleic acid has a length in a range of from 2 to 50 nucleotides (nt) (e.g., from 2 to 40 nt, from 2 to 30 nt, from 2 to 25 nt, from 2 to 20 nt, from 5 to 50 nt, from 5 to 40 nt, from 5 to 30 nt, from 5 to 25 nt, from 5 to 20 nt, from 10 to 50 nt, from 10 to 40 nt, from 10 to 30 nt, from 10 to 25 nt, from 10 to 20 nt, from 17 to 50 nt, from 17 to 40 nt, from 17 to 30 nt, from 17 to 25 nt). In some cases, the length of an insertion site of a subject nucleic acid has a length in a range of from 5 to 40 nt.

[0189] In some cases, an insertion site is said to be operably linked to a promoter. In general, the intent of an insertion site is that this region of the nucleic acid will get modified (e.g., in some cases replaced) to include a nucleotide sequence encoding a transgene of interest (e.g., a transgene encoding a non-coding RNA, a transgene encoding a protein, etc.), such that the inserted transgene sequence will, once inserted, be operably linked to the promoter to which the insertion site was/is operably linked. Likewise, in some cases, an insertion site is said to be operably linked to a sequence encoding an RBS. In such cases, the intent is that an inserted transgene sequence will, once inserted, be operably linked to the RBS to which the insertion site was/is operably linked.

[0190] For example, in some cases a subject nucleic acid includes an insertion site operably linked to a promoter. In some such cases, the nucleic acid could later be modified by inserting a transgene sequence into the insertion site, and in some such cases (e.g., if the transgene sequence encodes a protein), the sequence to be inserted may include a sequence encoding an RBS upstream of a transgene sequence.

[0191] In some cases, a subject nucleic acid includes an insertion site operably linked to a promoter and operably linked to a sequence encoding an RBS. In some such cases, the nucleic acid could later be modified by inserting a transgene sequence (e.g., a transgene sequence encoding a protein) into the insertion site such that the inserted sequence will, once inserted, be operably linked to both the promoter and the sequence encoding an RBS to which the insertion site was/is operably linked.

### Nucleic Acids

[0192] In some embodiments, a subject nucleic acid is a vector. By a “vector” it is meant a nucleic acid that is capable of transferring a polynucleotide sequence, e.g. a transgene, to a target cell. For the purposes of the present disclosure, “vector construct” and “expression vector” generally refer to any nucleic acid construct, for example, a linear nucleic acid, a circular nucleic acid, a phage, a virus, a viral genome (a viral construct), a cosmid, a plasmid, and the like, that is capable of transferring a nucleotide sequence of interest (e.g., a transgene) into target cells (e.g., prokaryotic cells such as Bacteroides cells). Thus, the term includes cloning and expression vehicles, and extrachromosomally maintained vectors as well as integrating vectors.

[0193] In some cases, a subject expression vector is a linear nucleic acid vector. In some cases, a subject expression vector is a circular nucleic acid. In some cases, a subject expression vector can be maintained extrachromosomally, or“episomally” in the target cell, i.e., as a linear or circular nucleic acid that does not integrate into the target cell genome. In some cases, a subject expression vector can integrate into the genome of the host, i.e., as a linear or circular nucleic acid that integrates into the host genome.

[0194] In some cases, a subject nucleic acid (e.g., an expression vector) includes an origin of replication. By an “origin of replication” or “replication origin” it is meant a particular sequence in a genome at which replication is initiated. Origins of replication are found in prokaryotes and eukaryotes, and are required for the propagation of plasmids episomally (i.e. extragenomically) in host cells. By a “plasmid” it is meant a circular expression vector that comprises an origin of replication and a selectable marker.

[0195] In some cases, a subject nucleic acid (e.g., a plasmid) includes an origin of replication (e.g., one that is functional in a Bacteroides cell). However, in some embodiments, a subject nucleic acid (e.g., plasmid) has an origin of replication that is not functional in Bacteroides cells, but is functional in cells that are not Bacteroides cells (e.g., other prokaryotes such as E. coli). Such nucleic acids (e.g., plasmids such as an NBU2 integration plasmid) can be maintained episomally (e.g., propagated, amplified, isolated from, stored in, etc.) in prokaryotic cells that are not Bacteroides cells (e.g., they can in some cases be maintained episomally in E. coli), but are not maintained episomally in Bacteroides cells. Thus, instead of being maintained episomally in Bacteroides cells, these nucleic acids can be used for the integration of sequences (e.g., from a plasmid) into the genome of a Bacteroides cell (e.g., see the examples section below). In some cases, a subject nucleic acid is integrated into the genome of a Bacteroides cell.

### Methods

[0196] Nucleic acid expression using a subject nucleic acid (e.g., one that is integrated into a Bacteroides cell's genome, an expression vector, a plasmid, and the like) finds use in many applications, including research and therapeutic applications. Subject methods include but are not necessarily limited to methods of expressing a transgene in a prokaryotic cell (e.g., a Bacteroides cell), detectably labeling a Bacteroides cell in an animal's gut (e.g., distinguishably labeling two or more Bacteroides cells), delivering a protein to an individual's gut, and treating an individual (e.g., by delivering a protein-secreting Bacteroides cell to an individual's gut).

[0197] In some embodiments (e.g., in methods of detectably labeling, delivering, and/or treating) a Bacteroides cell (e.g., a cell comprising a subject nucleic acid) is introduced into an individual (e.g., into the individual's gut). The individual can be any mammalian species, e.g. rodent (e.g., mouse, rat), ungulate, cow, pig, sheep, camel, rabbit, horse, dog, cat, primate, non-human primate, human, etc. The individual may be a neonate, a juvenile, or an adult. In some cases, the introduction is by oral administration. Any convenient type of oral administration can be used. For example, oral administration can include delivery via eating (e.g., incorporated into food), drinking (e.g., incorporated into a solution such as drinking water), oral gavage (e.g., using a stomach tube), aerosol spray, tablets, capsules, pills, powders, and the like. In some embodiments, a Bacteroides cell (e.g., a cell comprising a subject nucleic acid) is introduced into an individual (e.g., into the individual's gut) by delivery into the individual's colon.

[0198] As described for compositions, cells of the subject methods can be any prokaryotic cell in which a subject promoter is operable (e.g., prokaryotic cell, Bacteroides cell, E. coli cell). In some cases, the cell is a Bacteroides cell. In some cases, the Bacteroides cell is a species selected from: B. fragilis (B), B. distasonis (Bd), B. thetaiotaomicron (Bt), B. vulgatus (Bv), B. ovatus (Bo), B. eggerrthii (Be), B. merdae (Bm), B. stercoris (Bs), B. uniformis (Bu), and B. caccae (Bc). In some cases, the Bacteroides cell is a species selected from: B. fragilis (B), B. thetaiotaomicron (Bt), B. vulgatus (Bv), B. ovatus (Bo), and B. uniformis (Bu). In some cases, the Bacteroides cell is a species selected from: B. thetaiotaomicron (Bt), B. vulgatus (Bv), B. ovatus (Bo), and B. uniformis (Bu).

[0199] In some cases, a subject method is a method of expressing a subject nucleic acid in a prokaryotic cell. Such methods include introducing a subject nucleic acid into a prokaryotic cell. Any convenient method can be used to introduce a nucleic acid into a prokaryotic cell, e.g., by electroporation (e.g., using electro-competent cells), by conjugation, by chemical methods (e.g., using chemically competent cells), and the like. The introduced nucleic acid may or may not be integrated (covalently linked) into the genome of the cell, and as described above this may depend on the presence or absence of an origin of replication that is functional in the cell. For example, in some cases, the introduced nucleic acid integrates into the genome of the cell (as a chromosomal integrant), e.g., a nucleic acid may integrated into the genome of a Bacteroides cell if the nucleic acid does not have an origin of replication that is functional in that Bacteroides cell. In some cases, the introduced nucleic acid is maintained on an episomal element (extra chromosomal element) such as a plasmid.

[0200] In some cases, a subject method is a method of detectably labeling a Bacteroides cell in an animal's gut. In such cases, the Bacteroides cell (or population of cells) that is introduced into the gut, includes a subject nucleic acid that include a transgene whose expression produce detectably labels the cell. The phrase “detectably label” as used herein refers to a any detectable expression product (RNA, protein) that is detectable. The expression product (the label) can itself be detectable (directly detectable label) (e.g., a fluorescent protein), or the label can be indirectly detectable, e.g., in the case of an enzymatic label, the enzyme (e.g., luciferase) may catalyze a chemical alteration of a substrate compound or composition and the product of the reaction is detectable.

[0201] In some cases, two or more Bacteroides cells (e.g., two distinct populations of Bacteroides cells) are labeled in such a way that the two or more cells (or two or cell populations) are distinguishable from one another. The two cells (or cell populations) can differ from one another in a variety of ways. For example, the cells can be of different species (e.g., when it is desired to assay competition or balance between two different species), the cells can be expressing different transgenes (e.g., different therapeutic peptides), and the like.

[0202] Distinguishably labeling two or more cells (or cell populations) from one another can be achieved in a number of different ways and any convenient way is suitable. For example, a first cell (or cell population) can be labeled with a first transgene (i.e., the first cell includes a subject nucleic acid having a first transgene—where an expression product of the first transgene is detectable), while a second cell (or cell population) can be labeled with a second transgene (i.e., the second cell includes a subject nucleic acid having a second transgene—where an expression product of the second transgene is detectable). The two cells can be distinguishably labeled if the first and second expression products are different. As an illustrative example, such would be the case if—Case 1—(1) the first cell included a subject nucleic acid in which a sequence encoding a green fluorescent protein (GFP) was operably linked to a subject promoter, and (2) the second cell included a subject nucleic acid in which a sequence encoding a red fluorescent protein (RFP) was operably linked to a subject promoter. In Case 1, the promoters in the first and second cells could be the same promoter because the expression products themselves are distinguishable and thus, the first and second cells would be distinguishable from one another because the labels are distinguishable from one another.

[0203] However, two cells could also be distinguishably labeled from one another even if they were producing the same transgene expression product (e.g., GFP). As an illustrative example, such would be the case if—Case 2—(1) the first cell included a subject nucleic acid in which a sequence encoding a green fluorescent protein (GFP) was operably linked to a subject promoter, and (2) the second cell included a subject nucleic acid in which a sequence encoding a green fluorescent protein (GFP) (the same transgene as the first cell) was operably linked to a different promoter of different strength. In Case 2, the promoters in the first and second cells can be different so that the amount of transgene expression product produced is different between the first and second cells. The cells would then be distinguishable from one another because one would be characteristically brighter than the other.

[0204] In some cases, a detectably labeled Bacteroides cell (or cell population) is introduced into an animal's gut. In some cases, two or more distinguishably labeled Bacteroides cells (e.g., cell populations) can be introduced into an animal's gut. If desired, the label(s) can then be detected at numerous time points (tracked), and/or various parameters can be assayed. For example, measuring the label(s) can provide information about survival of the labeled cells in the gut, the sub-location of cells within the gut, the number of cells present of particular tracked species within the gut, the relative number of tracked species, and the like.

[0205] In some cases, a subject method is a method of delivering a protein to an individual's gut (which in some cases can be considered a method of treating). In some such cases, a Bacteroides cell is introduced into the gut of an animal, where the cell includes a subject nucleic acid encoding a subject fusion protein (e.g., a secreted Bacteroides polypeptide fused to a heterologous polypeptide of interest, e.g., a therapeutic peptide such as an anti-inflammation peptide or a metabolic enzyme). Any convenient fusion protein of the subject fusion proteins described above can be used. The polypeptide of interest of such of fusion protein can be one that has any desirable activity in the gut (e.g., in the extracellular environment of the gut, in side of the Bacteroides cell, or inside of a cell of the animal, e.g., if a subject fusion protein is secreted from the bacteria via outer membrane vesicles (OMVs) and the contents of the OMVs make their way into a host cell). As noted above, in some cases, the polypeptide of interest is a therapeutic peptide (e.g., a peptide that can, when secreted from a Bacteroides cell, e.g., in the gut of an individual via OMVs or via classical secretion across the outer membrane, have a positive impact on a clinical parameter of the individual) and the method can be considered a method of treating an individual in need thereof. For example, the polypeptide of interest can: have antimicrobial (antibiotic) activity (e.g., against one or more gut microbes), function to change gut environmental parameters (e.g., pH control), affect inflammation, provide an enzymatic activity to the Bacteroides cell (internal to the cell), and the like. All of these types of polypeptides of interest can be considered therapeutic peptides.

[0206] Because a large variety of polypeptides of interest (any polypeptide of interest) can be delivered using a subject secreted fusion protein (e.g., one with a cleavable linker between the polypeptide of interest and the secreted Bacteroides protein), a large variety of individuals with a large variety of ailments can be targeted (i.e., a subject Bacteroides cell can be introduced into a variety of individuals with a variety of ailments). Diseases that can be treated with a therapeutic peptide include but are not limited to diseases that are impacted by the gut microbiota, including obesity, diabetes, heart disease, central nervous system diseases, rheumatoid arthritis, metabolic disorders, and cancer. For example, in some cases, the individual has gut inflammation, and in some such cases the individual has antiinflammatory diseases (e.g., Crohn's disease, ulcerative colitis, and the like), and in some cases gut inflammation can indirectly impact the disease, such as colorectal cancer or obesity.

[0207] As noted above, examples of therapeutic peptides that can be used as polypeptides on interest in a subject fusion protein include but are not limited to metabolic enzymes and anti-inflammatory peptides, which can include but are not limited to those presented in Table 8 (SEQ ID NOs: 411-417). In some cases (e.g., in some cases where the individual has gut inflammation, e.g., colitis), the polypeptide of interest includes an amino acid sequence selected from: RYTVELA (SEQ ID NO: 411)(Peptide 101.10), VTLVGNTFLQSTINRTIGVL (SEQ ID NO: 412)(Fp MAM-pep5), and MQPPGC (SEQ ID NO: 413)(CD80-CAP1). In some cases (e.g., in some cases where the individual has gut inflammation, e.g., colitis), the polypeptide of interest includes an amino acid sequence selected from: RYTVELA (SEQ ID NO: 411)(Peptide 101.10), and VTLVGNTFLQSTINRTIGVL (SEQ ID NO: 412)(Fp MAM-pep5). In some cases, the polypeptide of interest includes the amino acid sequence RYTVELA (SEQ ID NO: 411)(Peptide 101.10). In some cases, the polypeptide of interest includes the amino acid sequence VTLVGNTFLQSTINRTIGVL (SEQ ID NO: 412)(Fp MAM-pep5).

### Kits

[0208] Also provided are kits, e.g., for practicing any of the above methods. The contents of the subject kits may vary greatly. A kit can include: (i) a first subject nucleic acid (e.g., a nucleic acid that includes a promoter operable in a Bacteroides cell operably linked to a heterologous nucleotide sequence of interest), and (ii) at least one of: a Bacteroides cell, and a second subject nucleic acid. In some cases, the promoters of the first and second nucleic acids are different. In some cases, the nucleotide sequence of interest of the first and second nucleic acids are different. In some cases, a kit includes two or more (3 or more, 4 or more, etc.) subject nucleic acids, each with a different promoter (e.g., each with promoters of a different strength). In some cases, the nucleic acid(s) of a subject kit is a plasmid. In some cases, the plasmid(s) can be propagated episomally in E. coli, but does not contain an origin of replication that is functional in Bacteroides cells. In some cases, a subject kit includes one or more species of Bacteroides cells selected from: B. fragilis (B), B. distasonis (Bd), B. thetaiotaomicron (Bt), B. vulgatus (Bv), B. ovatus (Bo), B. eggerrthii (Be), B. merdae (Bm), B. stercoris (Bs), B. uniformis (Bu), and B. caccae (Bc). In some cases, the cell(s) of the kit do not (yet) contain a subject nucleic acid. In some cases, the cell(s) of the kit includes a subject nucleic acid integrated into the genome of the cell.

[0209] In addition to the above components, the subject kits can further include instructions for practicing the subject methods. These instructions may be present in the subject kits in a variety of forms, one or more of which may be present in the kit. One form in which these instructions may be present is as printed information on a suitable medium or substrate, e.g., a piece or pieces of paper on which the information is printed, in the packaging of the kit, in a package insert, etc. Yet another means would be a computer readable medium, e.g., diskette, CD, flash drive, etc., on which the information has been recorded. Yet another means that may be present is a website address which may be used via the internet to access the information at a removed site. Any convenient means may be present in the kits.

### Examples of Non-Limiting Aspects of the Disclosure

[0210] Aspects, including embodiments, of the present subject matter described above may be beneficial alone or in combination, with one or more other aspects or embodiments. Without limiting the foregoing description, certain non-limiting aspects of the disclosure: Set A numbered 1-73; and Set B numbered 1-77 are provided below. As will be apparent to those of skill in the art upon reading this disclosure, each of the individually numbered aspects may be used or combined with any of the preceding or following individually numbered aspects. This is intended to provide support for all such combinations of aspects and is not limited to combinations of aspects explicitly provided below:

### Set A

[0211] 1. A nucleic acid for expression in a prokaryotic cell, the nucleic acid comprising:

[0212] (a) a promoter operable in a Bacteroides cell, wherein the promoter comprises a nucleotide sequence having:
[0213] (i) 80% or more identity with the nucleotide sequence:
   [0214] GTTAA (n)₃₋₇ GTTAA (n)₃₆₋₃₈ TA (n)₂ TTG (SEQ ID NO: 400), and/or
[0215] (ii) 80% or more identity with the phage promoter sequence set forth in any of SEQ ID NOs: 388 and 407; and

[0216] (b) a heterologous nucleotide sequence of interest that is operably linked to the promoter.

2. The nucleic acid according to 1, wherein the nucleotide sequence of interest is a transgene sequence that encodes a protein.
3. The nucleic acid according to 2, wherein the protein encoded by the transgene sequence is a reporter protein, a selectable marker protein, a metabolic enzyme, and/or a therapeutic protein.
4. The nucleic acid according to 2 or 3, wherein the protein encoded by the transgene sequence is a fusion protein comprising a cleavable linker and a secreted Bacteroides polypeptide fused to a heterologous polypeptide of interest, wherein the cleavable linker is positioned between the secreted Bacteroides polypeptide and the polypeptide of interest.
5. The nucleic acid according to 1, wherein the nucleotide sequence of interest is a transgene sequence that encodes a non-coding RNA.
6. The nucleic acid according to 1, wherein the nucleotide sequence of interest is an insertion site.
7. The nucleic acid according to 6, wherein the insertion site is a multiple cloning site.
8. The nucleic acid according to any of 1-7, wherein the promoter comprises a nucleotide sequence that has 80% or more sequence identity with the wild type Bacteroides phage promoter sequence set forth in SEQ ID NO: 388.
9. The nucleic acid according to any of 1-8, wherein the promoter comprises the nucleotide sequence set forth in any of SEQ ID NOs: 381-388.
10. The nucleic acid according to 8 or 9, wherein the promoter is a synthetic promoter.
11. The nucleic acid according to any of 1-7, wherein the promoter comprises the nucleotide sequence GTTAA (n)₃₋₇ GTTAA (n)₃₆₋₃₈ TA (n)₂ TTTG (SEQ ID NO: 400).
12. The nucleic acid according to any of 1-11, further comprising a sequence encoding a ribosomal binding site (RBS), wherein the sequence encoding the ribosomal binding site (RBS) is operably linked to the promoter and to the nucleotide sequence of interest, and is positioned 5′ of the nucleotide sequence of interest.
13. The nucleic acid according to 12, wherein the sequence encoding the RBS comprises a nucleotide sequence that has 80% or more sequence identity with the sequence set forth in any of SEQ ID NOs: 10-18.
14. The nucleic acid according to 12, wherein the RBS is a synthetic RBS and the sequence encoding the synthetic RBS comprises a nucleotide sequence that has 80% or more sequence identity with the sequence set forth in any of SEQ ID NOs: 11-18.
15. The nucleic acid according to any of 12-14, comprising the nucleotide sequence set forth in any of SEQ ID NOs: 20-83.
16. The nucleic acid according to any of 1-15, further comprising a terminator sequence upstream of the promoter.
17. The nucleic acid according to any of 1-16, wherein the nucleic acid is a plasmid.
18. The nucleic acid according to 17, wherein the plasmid comprises an origin of replication that functions in prokaryotic cells other than Bacteroides cells, but does not function in Bacteroides cells.
19. A nucleic acid for expression in a prokaryotic cell, the nucleic acid comprising, in 5′ to 3′ order:

[0217] (a) a promoter operable in a prokaryotic cell;

[0218] (b) a sequence encoding a synthetic ribosomal binding site (RBS), wherein said sequence: (i) is operably linked to the promoter, and (ii) comprises a nucleotide sequence that has 80% or more sequence identity with the sequence set forth in any of SEQ ID NOs: 10-18; and

[0219] (c) a nucleotide sequence of interest that is operably linked to the promoter and to the synthetic RBS.

20. The nucleic acid according to 19, wherein the sequence encoding the synthetic RBS comprises the nucleotide sequence set forth in any of SEQ ID NOs: 11-18.
21. The nucleic acid according to 19 or 20, wherein the nucleotide sequence of interest encodes a protein.
22. The nucleic acid according to 19 or 20, wherein the nucleotide sequence of interest is an insertion site.
23. A prokaryotic cell comprising the nucleic acid of any of 1-22.
24. The prokaryotic cell of 23, wherein the nucleic acid is not integrated into a chromosome of the prokaryotic cell.
25. The prokaryotic cell of 23, wherein the nucleic acid is integrated into a chromosome of the prokaryotic cell.
26. The prokaryotic cell of any of 23-25, wherein the cell is a Bacteroides cell.
27. The prokaryotic cell of any of 23-25, wherein the cell is a prokaryotic cell that is not a Bacteroides cell.
28. The prokaryotic cell of 27, wherein the cell is an E. coli cell.
29. A kit for expression in prokaryotic cells, the kit comprising:

[0220] (i) a first nucleic acid of any of 1-22; and

[0221] (ii) at least one of: (a) a Bacteroides cell, and (b) a second nucleic acid of any of 1-22.

30. The kit of 29, comprising the first and second nucleic acids, each of which comprise
(i) a promoter that comprises a nucleotide sequence that has 80% or more sequence identity with the wild type Bacteroides phage promoter sequence set forth in SEQ ID NO: 388, and
(ii) a sequence encoding a synthetic ribosomal binding site (RBS) that comprises a nucleotide sequence that has 80% or more sequence identity with the sequence set forth in any of SEQ ID NOs: 11-18.
31. The kit of 30, wherein the first and second nucleic acids each comprise the nucleotide sequence set forth in any of SEQ ID NOs: 20-83.
32. The kit of any of 29-31, wherein the first and/or second nucleic acid is a plasmid.
33. The kit of any of 29-32, comprising a third nucleic acid of any of 1-22.
34. A method of expressing a nucleic acid in a prokaryotic cell, the method comprising: introducing the nucleic acid of any of 1-22 into a prokaryotic cell.
35. The method according to 34, wherein the prokaryotic cell is a Bacteroides cell.
36. The method according to 35, wherein the Bacteroides cell is a cell of a species selected from: B. fragilis (Bt), B. distasonis (Bd), B. thetaiotaomicron (Bt), B. vulgatus (Bv), B. ovatus (Bo), B. eggerrthii (Be), B. merdae (Bm), B. stercoris (Bs), B. uniformis (Bu), and B. caccae (Bc).
37. The method according to 34, wherein the prokaryotic cell is an E. coli cell.
38. The method according to any of 34-37, wherein the nucleotide sequence of interest is a transgene encoding a fusion protein comprising a cleavable linker and a secreted Bacteroides polypeptide fused to a heterologous polypeptide of interest, wherein the cleavable linker is positioned between the secreted Bacteroides polypeptide and the polypeptide of interest.
39. A method of detectably labeling a Bacteroides cell in an animal's gut, the method comprising:

[0222] introducing, into the gut of the animal, a first detectably labeled Bacteroides cell comprising a first nucleic acid comprising:

[0223] (a) a first promoter operable in Bacteroides cells, wherein the first promoter comprises a nucleotide sequence having:
[0224] (i) 80% or more identity with the nucleotide sequence:
   [0225] GTTAA (n)₃₋₇ GTTAA (n)₃₆₋₃₈ TA (n)₂ TTTG (SEQ ID NO: 400), and/or
[0226] (ii) 80% or more identity with the phage promoter sequence set forth in any of SEQ ID NOs: 388 and 407; and

[0227] (b) a first transgene comprising a nucleotide sequence that encodes a first expression product that detectably labels the first detectably labeled Bacteroides cell, wherein the first transgene is: (i) heterologous relative to the first promoter and (ii) operably linked to the first promoter.

40. The method according to 39, wherein the method comprises introducing, into the gut of the animal, a second detectably labeled Bacteroides cell comprising a second nucleic acid comprising:

[0228] (a) a second promoter operable in Bacteroides cells, wherein the second promoter comprises a nucleotide sequence having:
[0229] (i) 80% or more identity with the nucleotide sequence:
   [0230] GTTAA (n)₃₋₇ GTTAA (n)₃₆₋₃₈ TA (n)₂ TTG (SEQ ID NO: 400), and/or
[0231] (ii) 80% or more identity with the phage promoter sequence set forth in any of SEQ ID NOs: 388 and 407; and

[0232] (b) a second transgene comprising a nucleotide sequence that encodes a second expression product that detectably labels the second detectably labeled Bacteroides cell, wherein the second transgene is: (i) heterologous relative to the second promoter and (ii) operably linked to the second promoter,

[0233] wherein the first and second detectably labeled Bacteroides cells are distinguishable from one another.

41. The method according to 40, wherein the first and second expression products are distinguishable from one another.
42. The method according to 41, wherein the first and second promoters are the same.
43. The method according to 40, wherein the first and second expression products are indistinguishable from one another, but the first and second promoters are different from one another and produce different amounts of the first and second expression products.
44. The method according to any of 39-43, wherein the first expression product is a reporter protein.
45. The method according to 44, wherein the reporter protein is a fluorescent protein.
46. The method according to any of 39-45, wherein the first Bacteroides cell is the same species as the second Bacteroides cell.
47. The method according to any of 39-45, wherein the first Bacteroides cell is not the same species as the second Bacteroides cell.
48. A fusion protein comprising: a secreted Bacteroides polypeptide fused to a heterologous polypeptide of interest.
49. The fusion protein of 48, wherein the secreted Bacteroides polypeptide is a secreted fragment or secreted variant of a naturally occurring Bacteroides polypeptide.
50. The fusion protein of 48 or 49, wherein the secreted Bacteroides polypeptide comprises an amino acid sequence that has 80% or more sequence identity with the amino acid sequence set forth in any of SEQ ID NOs: 458-484.
51. The fusion protein of 48, wherein the secreted Bacteroides polypeptide is a naturally occurring secreted protein of a Bacteroides cell.
52. The fusion protein of 48 or 51, wherein the secreted Bacteroides polypeptide comprises the amino acid sequence set forth in any of SEQ ID NOs: 458-484.
53. The fusion protein of 52, wherein the secreted Bacteroides polypeptide comprises the amino acid sequence set forth in SEQ ID NO: 459.
54. The fusion protein of any of 48-53, comprising a cleavable linker positioned between the secreted Bacteroides polypeptide and the polypeptide of interest.
55. The fusion protein of 54, wherein the cleavable linker is cleavable by one or more gut proteases.
56. The fusion protein of 55, wherein the cleavable linker is cleavable by one or more gut proteases selected from: a trypsin, a chymotrypsin, and an elastase.
57. The fusion protein of 55, wherein the cleavable linker is set forth in any of SEQ ID NOs: 420-453
58. The fusion protein of any of 48-57, wherein polypeptide of interest comprises the amino acid sequence of any one of the peptides presented in Table 8 (SEQ ID NOs: 411-417).
59. The fusion protein of 58, wherein polypeptide of interest comprises the amino acid sequence RYTVELA (SEQ ID NO: 411) or VTLVGNTFLQSTINRTIGVL (SEQ ID NO: 412).
60. A nucleic acid encoding the fusion protein of any of 48-59.
61. The nucleic acid of 60, wherein the nucleic acid is a plasmid.
62. The nucleic acid of 61, wherein the plasmid comprises an origin of replication that functions in prokaryotic cells other than Bacteroides cells, but does not function in Bacteroides cells.
63. A method of delivering a protein to an individual's gut, the method comprising: introducing, into an individual's gut, a Bacteroides cell comprising the nucleic acid according to any one of 1-22 and 60-62.
64. The method according to 63, wherein the nucleic acid is integrated into the genome of the Bacteroides cell.
65. The method according to 63 or 64, wherein the individual has a disease impacted by gut microbiota.
66. The method according to 65, wherein the individual has a disease selected from: obesity, diabetes, heart disease, central nervous system diseases, rheumatoid arthritis, metabolic disorders, and cancer.
67. The method according to 63 or 64, wherein the individual has gut inflammation.
68. The method according to 63 or 64, wherein the individual has colitis.
69. The method according to any of 65-68, wherein the method of is a method of treating the individual.
70. The method according to any of 63-69, wherein the Bacteroides cell is a cell of a species selected from: B. fragilis (B), B. distasonis (Bd). B. thetaiotaomicron (Bt), B. vulgatus (Bv), B. ovatus (Bo), B. eggerrthii (Be), B. merdae (Bm), B. stercoris (Bs), B. uniformis (Bu), and B. caccae (Bc).
71. The method of 70, wherein the Bacteroides cell is a B. thetaiotaomicron (Bt) cell.
72. The method according to any of 63-71, wherein polypeptide of interest comprises the amino acid sequence RYTVELA (SEQ ID NO: 411) or VTLVGNTFLQSTINRTIGVL (SEQ ID NO: 412).
73. A method of treating an individual in need thereof, comprising:
[0234] performing the method of any of 65-68.

### Set B

[0235] 1. A nucleic acid, comprising:
(a) a promoter operable in a prokaryotic cell, wherein the promoter comprises a nucleotide sequence comprising one or more of the following:
(i) 80% or more sequence identity of defined nucleotides of the nucleotide sequence:
GTTAA (n)₄₋₇ GTTAA (n)₃₄₋₃₈ TA (n)₂ TTTG,
(ii) 80% or more sequence identity with a sequence set forth in any of SEQ ID NOs: 388 and 407,
(iii) a nucleotide sequence comprising GTTAA (n)₄₋₇ GTTAA,
(iv) a nucleotide sequence comprising GTTAA (n)₄₄₋₅₀ TA,
(v) a nucleotide sequence comprising GTTAA (n)₄₈₋₅₄ TTTG,
(vi) a nucleotide sequence comprising GTTAA (n)₃₆₋₃₈ TA,
(vii) a nucleotide sequence comprising GTTAA (n)₄₀₋₄₂ TTTG,
(viii) a nucleotide sequence comprising GTTAA (n)₃₋₇ GTTAA (n)₃₆₋₃₈ TA,
(ix) a nucleotide sequence comprising GTTAA (n)₃₋₇ GTTAA (n)₄₀₋₄₂ TTTG,
(x) a nucleotide sequence comprising GTTAA (n)₄₄₋₅₀ TA (n)₂ TTTG,
(xi) a nucleotide sequence comprising GTTAA (n)₃₆₋₃₈ TA (n)₂ TTTG,
(xii) a nucleotide sequence comprising GTTAA (n)₀₋₂₀ GTTAA (n)₁₀₋₆₀ TA (n)₀₋₁₀ TTTG,
(xiii) a nucleotide sequence comprising TTAA (n)₀₋₁₀ TTAA (n)₃₀₋₅₀ TA (n)₂ TTTG,
(xiv) a nucleotide sequence comprising GTTAA (n)₄₋₇ GTTAA (n)₃₈₋₃₉ TA (n)₂ TTTGC,
(xv) a nucleotide sequence comprising GTTAA (n)₄₋₇ GTTAA (n)₃₆₋₃₈ TA (n)₂ TTTG,
(xvi) a nucleotide sequence comprising GTTAA (n)₄₋₇ GTTAA (n)₃₄₋₃₈ TA (n)₂ TTTG,
(xvii) a nucleotide sequence comprising GTTAA (n)₄₋₇ GTTAA (n)₃₆₋₃₈ TA (n)₂ TTTG,
(xviii) a nucleotide sequence comprising GTTAA (n)₃₋₇ GTTAA (n)₃₃₋₃₈ TA (n)₂ TTTG,
(xix) a nucleotide sequence comprising GTTAA (n)₄₋₇ GTTAA (n)₁₂₋₁₆ TTG (n)₁₈₋₂₂ TA (n)₂ TTTGC,
(xx) a nucleotide sequence comprising GTTAA (n)₃₋₇ GTTAA (n)₁₂₋₁₆ TTG (n)₁₈₋₂₂ TA (n)₂ TTTG,
(xxi) a nucleotide sequence comprising GTTAA (n)₄₋₈ GTTAA (n)₁₂₋₁₆ TTG (n)₁₈₋₂₂ TA (n)₂ TTTG, and
(xxii) a nucleotide sequence comprising GTTAA (n)₄₋₇ GTTAA (n)₁₂₋₁₆ TTG (n)₁₈₋₂₂ TA (n)₂ TTTG,
wherein each n is independently selected from A, C, G, and T; and
(b) a nucleotide sequence of interest that is operably linked to the promoter, wherein the nucleotide sequence of interest and the promoter are not found operably linked in nature.
2. The nucleic acid of 1, wherein the prokaryotic cell is a Bacteroides cell.
3. A nucleic acid, comprising:
(a) a promoter operable in a Bacteroides cell, and
(b) a nucleotide sequence of interest that is operably linked to the promoter, wherein the nucleotide sequence of interest and the promoter are not found operably linked in nature, wherein the promoter provides one or more of the following when the nucleic acid is expressed in the Bacteroides cell:
(i) an increase in mRNA production of at least 30% relative to a native Bacteroides promoter,
(ii) an increase in fluorescence of at least 2000% relative to autofluorescence, wherein the nucleotide sequence of interest encodes super-folding GFP, or
(iii) a cytoplasmic protein concentration of at least 1.5 μM, wherein the nucleotide sequence of interest encodes the protein.
4. The nucleic acid of 3, wherein the native Bacteroides promoter is a native Bacteroides rRNA promoter.
5. The nucleic acid of 3, wherein the increase in mRNA production is at least 50%.
6. The nucleic acid of 3, wherein the increase in mRNA production is at least 100%.
7. The nucleic acid of 3, wherein the increase in fluorescence is at least 5000%.
8. The nucleic acid of 3, wherein the increase in fluorescence is at least 8000%.
9. The nucleic acid of 3, wherein the cytoplasmic protein concentration is at least 2 μM.
10. The nucleic acid of 3, wherein the cytoplasmic protein concentration is at least 5 μM.
11. The nucleic acid of 3, wherein the cytoplasmic protein concentration is at least 10 μM.
12. The nucleic acid of 3, wherein the protein is luciferase.
13. The nucleic acid of 1 or 3, wherein the promoter is a phage promoter or a functional fragment thereof.
14. The nucleic acid of 12, wherein the phage is ϕB124-14.
15. The nucleic acid of 1 or 3, wherein the promoter is a non-naturally occurring promoter.
16. The nucleic acid of 1 or 3, wherein the promoter comprises a nucleotide sequence having 80% or more sequence identity with the nucleotide sequence: GTTAA (n)₃₋₇ GTTAA (n)₃₆₋₃₈ TA (n)₂ TTTG (SEQ ID NO: 400).
17. The nucleic acid of any of 1-7, wherein the promoter comprises the nucleotide sequence GTTAA (n)₃₋₇ GTTAA (n)₃₆₋₃₈ TA (n)₂ TTTG (SEQ ID NO: 400).
18. The nucleic acid of 1 or 3, wherein the promoter comprises a nucleotide sequence that has 80% or more sequence identity with the sequence set forth in any of SEQ ID NOs: 388 and 407.
19. The nucleic acid of 1 or 3, wherein the promoter comprises the nucleotide sequence set forth in any of SEQ ID NOs: 381-388.
20. The nucleic acid of 1 or 3, wherein the nucleotide sequence of interest comprises a transgene sequence that encodes a protein.
21. The nucleic acid of 17, wherein the protein encoded by the transgene sequence comprises a reporter protein, a selectable marker protein, a metabolic enzyme, or a therapeutic protein.
22. The nucleic acid of 17, wherein the protein encoded by the transgene sequence is a fusion protein comprising a cleavable linker and a secreted Bacteroides polypeptide fused to a heterologous polypeptide of interest, wherein the cleavable linker is positioned between the secreted Bacteroides polypeptide and the polypeptide of interest.
23. The nucleic acid of 1 or 3, wherein the nucleotide sequence of interest comprises a transgene sequence that encodes a non-coding RNA.
24. The nucleic acid of 1 or 3, wherein the nucleotide sequence of interest is an insertion site.
25. The nucleic acid of 24, wherein the insertion site is a multiple cloning site.
26. The nucleic acid of any of 1-25, further comprising a sequence encoding a ribosomal binding site (RBS), wherein the sequence encoding the ribosomal binding site (RBS) is operably linked to the promoter and to the nucleotide sequence of interest, and is positioned 5′ of the nucleotide sequence of interest.
27. The nucleic acid of any of 1-26, further comprising a terminator sequence upstream of the promoter.
28. The nucleic acid of any of 1-27, wherein the nucleic acid is a plasmid.
29. The nucleic acid of 28, wherein the plasmid comprises an origin of replication that functions in prokaryotic cells other than Bacteroides cells, but does not function in Bacteroides cells.
30. A prokaryotic cell comprising the nucleic acid of any of 1-29.
31. The prokaryotic cell of 21, wherein the nucleic acid is not integrated into a chromosome of the prokaryotic cell.
32. The prokaryotic cell of 21, wherein the nucleic acid is integrated into a chromosome of the prokaryotic cell.
33. The prokaryotic cell of any of 21-22, wherein the prokaryotic cell is a Bacteroides cell.
34. The prokaryotic cell of any of 21-22, wherein the prokaryotic cell is not a Bacteroides cell.
35. The prokaryotic cell of 24, wherein the prokaryotic cell is an E. coli cell.
36. A method of expressing a nucleic acid in a prokaryotic cell, the method comprising: introducing the nucleic acid of any of 1-29 into the prokaryotic cell.
37. The method of 36, wherein the prokaryotic cell is a Bacteroides cell.
38. The method of 27, wherein the Bacteroides cell is a cell of a species selected from: B. fragilis (B), B. distasonis (Bd), B. thetaiotaomicron (Bt), B. vulgatus (Bv), B. ovatus (Bo), B. eggerrthii (Be), B. merdae (Bm), B. stercoris (Bs), B. uniformis (Bu), and B. caccae (Bc).
39. The method of 36, wherein the prokaryotic cell is an E. coli cell.
40. The method of any of 36-29, wherein the nucleotide sequence of interest is a transgene encoding a fusion protein comprising a cleavable linker and a secreted Bacteroides polypeptide fused to a heterologous polypeptide of interest, wherein the cleavable linker is positioned between the secreted Bacteroides polypeptide and the polypeptide of interest.
41. A fusion protein comprising: a secreted Bacteroides polypeptide fused to a heterologous polypeptide of interest.
42. The fusion protein of 31, wherein the secreted Bacteroides polypeptide is a secreted fragment or secreted variant of a naturally occurring Bacteroides polypeptide.
43. The fusion protein of 31-42, wherein the secreted Bacteroides polypeptide comprises an amino acid sequence that has 80% or more sequence identity with an amino acid sequence set forth in any of SEQ ID NOs: 458-484.
44. The fusion protein of 31, wherein the secreted Bacteroides polypeptide is a naturally occurring secreted protein of a Bacteroides cell.
45. The fusion protein of 31 or 44, wherein the secreted Bacteroides polypeptide comprises an amino acid sequence set forth in any of SEQ ID NOs: 458-484.
46. The fusion protein of 45, wherein the secreted Bacteroides polypeptide comprises the amino acid sequence set forth in SEQ ID NO: 459.
47. The fusion protein of any of 31-46, comprising a cleavable linker positioned between the secreted Bacteroides polypeptide and the polypeptide of interest.
48. The fusion protein of 33, wherein the cleavable linker is cleavable by one or more gut proteases.
49. The fusion protein of 34, wherein the cleavable linker is cleavable by one or more gut proteases selected from: a trypsin, a chymotrypsin, and an elastase.
50. The fusion protein of 34, wherein the cleavable linker is set forth in any of SEQ ID NOs: 420-453.
51. The fusion protein of any of 31-36, wherein the polypeptide of interest is an anti-inflammatory peptide.
52. The fusion protein of 37, wherein the anti-inflammatory peptide comprises an amino acid sequence set forth in any of SEQ ID NOs: 411-417.
53. The fusion protein of 38, wherein the anti-inflammatory peptide comprises the amino acid sequence RYTVELA (SEQ ID NO: 411) or VTLVGNTFLQSTINRTIGVL (SEQ ID NO: 412).
54. A nucleic acid encoding the fusion protein of any of 31-53.
55. The nucleic acid of 39, wherein the nucleic acid is a plasmid.
56. The nucleic acid of 40, wherein the plasmid comprises an origin of replication that functions in prokaryotic cells other than Bacteroides cells, but does not function in Bacteroides cells.
57. An outer membrane vesicle, comprising the fusion protein of any of 31-53.
58. A method of delivering a polypeptide, comprising:
recombinantly expressing the fusion protein of any of 31-53 in a prokaryotic cell; and delivering the fusion protein or the polypeptide of interest outside of the prokaryotic cell.
59. The method of 43, wherein the secreted Bacteroides polypeptide is secreted from the cell.
60. The method of 43, further comprising releasing the polypeptide of interest from the secreted Bacteroides polypeptide.
61. The method of 60, wherein release is performed by a protease.
62. The method of 61, wherein the protease is a gut protease.
63. The method of 61, wherein the protease is a cytoplasmic protease.
64. The method of 61, wherein the protease is a protease found in a cell of a different organism than the prokaryotic cell.
65. The method of 43, further comprising delivering the fusion protein or the polypeptide of interest to a gut.
66. The method of 43, further comprising packaging the fusion protein or the polypeptide of interest into an outer membrane vesicle.
67. The method of 45, further comprising fusing the outer membrane vesicle with a cell membrane of a second cell.
68. The method of 43, further comprising delivering the fusion protein or the polypeptide of interest to a second cell.
69. The method of 47, wherein the second cell is a eukaryotic cell.
70. The method of 47, wherein the second cell is a mammalian cell.
71. A method of delivering a protein to an individual's gut, the method comprising: introducing, into an individual's gut, a Bacteroides cell comprising the nucleic acid of any one of 1-29 and 39-41.
72. The method of 50, wherein the nucleic acid is integrated into the genome of the Bacteroides cell.
73. The method of 50 or 72, wherein the individual has a disease impacted by gut microbiota.
74. The method of 50 or 72, wherein the individual has a disease selected from: obesity, diabetes, heart disease, central nervous system diseases, rheumatoid arthritis, metabolic disorders, and cancer.
75. The method of 50 or 72, wherein the individual has gut inflammation.
76. The method of 50 or 72, wherein the individual has colitis.
77. The method of any of 50-54, wherein the Bacteroides cell is a cell of a species selected from: B. fragilis (B), B. distasonis (Bd), B. thetaiotaomicron (Bt), B. vulgatus (Bv), B. ovatus (Bo), B. eggerrthii (Be), B. merdae (Bm), B. stercoris (Bs), B. uniformis (Bu), and B. caccae (Bc).

### EXAMPLES

[0236] The following examples are put forth so as to provide those of ordinary skill in the art with a complete disclosure and description of how to make and use the present invention, and are not intended to limit the scope of what the inventors regard as their invention nor are they intended to represent that the experiments below are all or the only experiments performed. Efforts have been made to ensure accuracy with respect to numbers used (e.g. amounts, temperature, etc.) but some experimental errors and deviations should be accounted for. Unless indicated otherwise, parts are parts by weight, molecular weight is weight average molecular weight, temperature is in degrees Centigrade, and pressure is at or near atmospheric.

[0237] In the examples below, the platform for engineering Bacteroides presented herein adds to an emerging palette of tools that can synergize to add new dimensions to the mechanistic understanding of gut ecology. The work here provides an example of the basic molecular insight into Bacteroides promoter architecture, which required high throughput strain generation. In addition, the work here facilitates defining single cell behavior in the context of the complex and dynamic gut microbial ecosystem. For example, closely related species or isogenic knockout variants can be distinguished and provide a step toward single cell reporting of location specific conditions within the gut (e.g., mammalian gut). The work here also provides tools that can directly be applied to develop therapeutic microbes. High expression from a strain, with secretion and clean release of peptides was applied to developing two therapeutic strains, each successful in treating murine colitis. The compositions and methods provided here for strain manipulation, protein expression and peptide secretion were demonstrated to function predictably across the Bacteroides genus and in different genetic and environmental contexts.

### Example 1: Strong Predictable Expression and High-Throughput Modification for the Abundant Gut Commensal Genus, Bacteroides

[0238] Appling synthetic biology to engineer gut-resident microbes provides a new avenue to investigate microbe-host interactions, perform diagnostics, and deliver therapeutics. The data presented here demonstrate a platform for engineering Bacteroides, the most abundant genus in Western microbiotas. Using a new high-throughput genomic integration method, a phage promoter was identified and a set of constitutive promoters spanning over four logs of strength was generated. These promoters produce an unprecedented level of expression, confer no fitness burden within the gut over 14 days, function predictably over a million-fold expression range in phylogenetically diverse Bacteroides species, and allowed strains living within the gut to be distinguished from one another by fluorescence.

### Results

### High-Throughput Strain Modification Method

[0239] The NBU2 integration plasmid was adapted for compatibility with Golden Gate cloning to enable rapid and reliable plasmid construction and genomic integration. These modifications were used for basic DNA parts to be assembled into expression cassettes on Bacteroides integration plasmids in a one-pot reaction (FIG. 4). A conjugation protocol was also developed that can be executed with 96-well compatible liquid handling steps to improve through-put of genetic modification. When combined with Golden Gate cloning the entire process of going from basic parts to colonies of Bacteroides with genomically integrated constructs could be performed in 3 days with high-throughput liquid handling (FIG. 1). To assess the accuracy of this protocol, 40 different 4-piece assemblies were performed and these constructs were genomically integrated into 4 different species of Bacteroides: B. thetaiotaomicron (Bt), B. vulgatus (Bv), B. ovatus (Bo), and B. uniformis (Bu). A success rate of over 99% was achieved using this new pipeline, with similar success rates for each species (FIG. 15—Table 1).

### Maximizing Protein Expression

[0240] Expression of heterologous proteins in Bacteroides at levels sufficient for detection in vivo has been a substantial challenge. Initial attempts to produce high protein expression in Bt using the 16S rRNA promoter (P_{rRNA}), previously used for high expression, combined with the Bacteroides consensus ribosome binding site (RBS) driving GFP failed to produce fluorescence above background levels. Thus, in an attempt to identify a strong RBS sequence and maximize protein production via translation, three different RBS libraries were designed: an A/G rich degenerate sequence resembling the reported consensus sequence, a completely degenerate sequence, and an A/T-rich sequence resembling the residues found upstream of B. fragilis (B) phage genes. When tested with P_{rRNA} (FIG. 5a) and a fructose inducible promoter, P_{BT1783} (FIG. 5b), the A/T-rich library sequence, N₉W₃A₃W₂TWANAATAATG (SEQ ID NO: 371), produced substantially stronger expression sequences than the other two libraries, while the A/G-rich library produced even weaker expression than the unbiased degenerate sequence. The phage based RBS library sequence was similar to the A/T-rich RBSs of highly expressed native Bacteroides genes. Despite the improvements in translation, the highest expression strain produced fluorescence only 40% above background, prompting a search for stronger promoters.

[0241] 17 sequences with a high identity to the Bacteroides promoter consensus sequence (found within either of two phage genomes) were synthesized and tested to identify a strong promoter. The length of the highest strength phage promoter was varied and an upstream intrinsic terminator was used for reduced context dependence. The promoter sequence from −100 to +20 from the putative transcription start site, based on homology, produced the highest expression (FIG. 6). This phage promoter, here termed P_{BfP1E6} (SEQ ID NO: 8), was compared to P_{rRNA}, the two strongest native Bt promoters identified from available transcriptional profiling data (P_{BT1830} and P_{BT4615}), and the strongest promoter from a recent publication on synthetic biology tools for Bt, P_{BT1311} (Parker et. al., Plasmid. 2012 September; 68(2):86-92). For each promoter tested, an A/T-rich RBS library of 192 RBSs was screened and the strongest RBS constructs for each promoter were compared. Strains with P_{BfP1E6}-driven expression produce fluorescence approximately 10-fold higher than the next highest promoter, P_{BT4615}, 40-fold higher than P_{BT1311}, and 70-fold higher than P_{rRNA} (FIG. 2a, black bars). This was repeated using the RBS optimized for the phage promoter with each other promoter giving similar results (FIG. 2a, grey bars). Although recent published attempts to express detectable levels of GFP in Bacteroides have been unsuccessful, the use of both the AT-rich RBS library and the phage promoter exhibited strong GFP expression from a single genomic integration that can be easily detected by eye under UV light (FIG. 7).

### Characterizing the Phage Promoter

[0242] Assessed next was how reliably the phage promoter functions in the gut and whether high protein expression results in a loss of Bt fitness. In culture, a 50:50 mix of the high GFP expression (P_{BfP1E6}) Bt strain and a non-expressing control Bt strain showed no significant difference in relative abundance after four successive growth cycles (FIG. 8). Next, a 50:50 mix of the two strains was inoculated into germ-free mice (n=5), to assess the fitness burden of high, constitutive protein expression in vivo. No difference in abundance between the strains was observed over the course of 14 days, with a small reduction from 50% to 35% during the next eight weeks (FIG. 2b). Imaging of the distal colon at day 71 post-colonization revealed a strong endogenous GFP fluorescence signal in −37% of the Bt (FIG. 2C and FIG. 9). Achieving high expression with this minimal fitness burden enables a wide range of novel applications, including detection of reporter expression with in vivo imaging. To understand transcriptional variability of the phage promoter under different in vivo and in vitro conditions, transcript levels were measured at different growth phases in culture and from different locations in gnotobiotic mice. Transcripts, measured via qPCR, from P_{BfP1E6} were relatively similar in all gut locations and culture conditions tested with less than a 4-fold maximum difference, while PA transcripts decreased more than 40-fold between mid-log and late-log growth phases (FIG. 10).

[0243] To characterize how changes in the phage promoter sequence influence expression levels, Bt strains were constructed that each expressed GFP with a single mutation in the promoter, for 94% of all possible mutations in the 76 residues upstream of the transcription start site (FIG. 2d). Of the 214 strains constructed, no single mutation significantly increased expression, suggesting that native sequence achieves a local optimum for expression. Based on previous literature, mutations in the residues between −4 and −54, particularly in the −7 and −33 regions (FIG. 2d highlighted in blue), were expected to most influence promoter activity. However, the −33 position was far less important than expected, and previously uncharacterized sequences at −49 to −53 and −60 to −64 (FIG. 2d highlighted in red) were important for promoter activity. Consistent with these data, the −51 region appears to be more highly conserved in native Bt promoters than the −33 region (FIG. 11a). The region upstream of the −33 is expected to contain the UP-element, which remains to be characterized in the Bacteroidetes phylum. The spacing of the GTTAA motifs within these two newly identified regions is consistent with the proximal (˜−42) and distal (˜−52) UP-elements of E. coli, but shifted in location by approximately 10 nucleotides. Table 5 depicts results from the above experiments.

TABLE 5
Strength of various tested promoter sequences (listed mutants are relative
to the wild type sequence set forth in SEQ ID NO: 150).

| | | SEQ ID |
|---|---|---|
| Mutant | Strength | NO |
| WT | 1.00 | 150 |
| T-76A | 0.92 | 151 |
| T-76C | 0.81 | 152 |
| T-76G | 0.86 | 153 |
| T-75A | 0.91 | 154 |
| T-75C | 0.94 | 155 |
| T-75G | 0.81 | 156 |
| G-74A | 0.86 | 157 |
| G-74C | 0.87 | 158 |
| G-74T | 0.88 | 159 |
| T-73C | 0.80 | 160 |
| T-73G | 0.82 | 161 |
| T-72A | 0.84 | 162 |
| T-72C | 0.86 | 163 |
| T-72G | 0.80 | 164 |
| T-71A | 0.90 | 165 |
| T-71C | 0.85 | 166 |
| T-71G | 0.82 | 167 |
| G-70A | 0.89 | 168 |
| G-70C | 0.80 | 169 |
| G-70T | 0.92 | 170 |
| C-69A | 0.92 | 171 |
| C-69G | 0.75 | 172 |
| C-69T | 0.88 | 173 |
| A-68C | 0.78 | 174 |
| A-68G | 0.88 | 175 |
| A-68T | 0.81 | 176 |
| A-67C | 0.84 | 177 |
| A-67G | 0.85 | 178 |
| A-67T | 0.89 | 179 |
| T-66A | 0.93 | 180 |
| T-66C | 0.81 | 181 |
| T-66G | 0.84 | 182 |
| G-65A | 0.87 | 183 |
| G-65C | 1.00 | 184 |
| G-65T | 0.93 | 185 |
| G-64A | 0.56 | 186 |
| G-64T | 0.61 | 187 |
| T-63C | 0.48 | 188 |
| T-63G | 0.37 | 189 |
| T-62A | 0.53 | 190 |
| T-62G | 0.55 | 191 |
| A-61C | 0.35 | 192 |
| A-61G | 0.33 | 193 |
| A-61T | 0.44 | 194 |
| A-60C | 0.56 | 195 |
| A-60G | 0.41 | 196 |
| A-60T | 0.64 | 197 |
| T-59A | 0.95 | 198 |
| T-59C | 0.80 | 199 |
| T-59G | 0.82 | 200 |
| C-58A | 0.90 | 201 |
| C-58G | 0.87 | 202 |
| C-58T | 0.85 | 203 |
| T-57A | 0.85 | 204 |
| T-57C | 0.91 | 205 |
| T-57G | 0.96 | 206 |
| A-56C | 0.93 | 207 |
| A-56G | 0.81 | 208 |
| A-56T | 0.94 | 209 |
| T-55A | 0.93 | 210 |
| T-55C | 0.89 | 211 |
| T-55G | 0.87 | 212 |
| T-54A | 0.93 | 213 |
| T-54C | 0.85 | 214 |
| T-54G | 0.85 | 215 |
| G-53A | 0.61 | 216 |
| G-53C | 0.68 | 217 |
| G-53T | 0.75 | 218 |
| T-52A | 0.59 | 219 |
| T-52C | 0.53 | 220 |
| T-51A | 0.74 | 221 |
| T-51C | 0.76 | 222 |
| T-51G | 0.52 | 223 |
| A-50G | 0.22 | 224 |
| A-50T | 0.31 | 225 |
| A-49C | 0.10 | 226 |
| A-49G | 0.24 | 227 |
| A-49T | 0.34 | 228 |
| A-48C | 0.73 | 229 |
| A-48G | 0.72 | 230 |
| A-48T | 0.79 | 231 |
| A-47C | 0.90 | 232 |
| A-47G | 0.97 | 233 |
| A-47T | 0.96 | 234 |
| T-46A | 0.94 | 235 |
| T-46C | 0.94 | 236 |
| T-46G | 0.91 | 237 |
| T-45A | 0.99 | 238 |
| T-45C | 0.95 | 239 |
| T-45G | 0.92 | 240 |
| T-44A | 1.05 | 241 |
| T-44G | 0.99 | 242 |
| A-43C | 0.94 | 243 |
| A-43G | 0.88 | 244 |
| A-43T | 0.85 | 245 |
| A-42G | 0.97 | 246 |
| A-42T | 0.86 | 247 |
| A-41C | 0.65 | 248 |
| A-41G | 0.88 | 249 |
| A-41T | 0.95 | 250 |
| G-40A | 0.99 | 251 |
| G-40C | 0.96 | 252 |
| G-40T | 0.87 | 253 |
| T-39A | 0.99 | 254 |
| T-39C | 0.93 | 255 |
| T-39G | 0.90 | 256 |
| T-38A | 0.87 | 257 |
| T-38C | 0.85 | 258 |
| T-38G | 0.88 | 259 |
| T-37A | 0.93 | 260 |
| T-37G | 0.91 | 261 |
| C-36A | 0.91 | 262 |
| C-36G | 0.98 | 263 |
| C-36T | 0.91 | 264 |
| A-35G | 0.97 | 265 |
| A-35T | 0.91 | 266 |
| C-34A | 0.78 | 267 |
| C-34G | 0.92 | 268 |
| C-34T | 0.91 | 269 |
| T-33A | 0.78 | 270 |
| T-33C | 0.82 | 271 |
| T-33G | 0.87 | 272 |
| T-32A | 0.97 | 273 |
| T-32C | 0.90 | 274 |
| T-32G | 0.93 | 275 |
| G-31A | 0.93 | 276 |
| G-31C | 0.80 | 277 |
| G-31T | 0.89 | 278 |
| A-30C | 0.94 | 279 |
| A-30G | 0.92 | 280 |
| A-30T | 0.94 | 281 |
| A-29C | 0.91 | 282 |
| A-29G | 0.93 | 283 |
| A-29T | 0.94 | 284 |
| C-28A | 0.95 | 285 |
| C-28G | 0.97 | 286 |
| C-28T | 0.91 | 287 |
| T-27A | 0.96 | 288 |
| T-27C | 0.80 | 289 |
| T-27G | 0.88 | 290 |
| T-26A | 0.93 | 291 |
| T-26C | 0.86 | 292 |
| T-26G | 0.88 | 293 |
| T-25A | 0.92 | 294 |
| T-25C | 0.97 | 295 |
| T-25G | 0.82 | 296 |
| C-24A | 0.91 | 297 |
| C-24G | 0.90 | 298 |
| C-24T | 0.80 | 299 |
| A-23C | 0.94 | 300 |
| A-23G | 1.00 | 301 |
| A-23T | 0.92 | 302 |
| A-22C | 0.86 | 303 |
| A-22G | 0.89 | 304 |
| A-22T | 0.88 | 305 |
| A-21C | 0.84 | 306 |
| A-21G | 0.88 | 307 |
| A-21T | 1.03 | 308 |
| T-20A | 1.00 | 309 |
| T-20G | 0.90 | 310 |
| A-19C | 0.83 | 311 |
| A-19G | 0.83 | 312 |
| A-19T | 0.94 | 313 |
| A-18C | 0.98 | 314 |
| A-18G | 0.99 | 315 |
| A-18T | 0.98 | 316 |
| T-17A | 0.91 | 317 |
| T-17C | 0.89 | 318 |
| T-17G | 0.83 | 319 |
| G-16A | 0.87 | 320 |
| G-16C | 1.03 | 321 |
| G-16T | 0.81 | 322 |
| T-15A | 0.88 | 323 |
| T-15C | 0.81 | 324 |
| T-15G | 0.95 | 325 |
| T-14A | 0.95 | 326 |
| T-14C | 0.99 | 327 |
| T-14G | 1.08 | 328 |
| C-13A | 0.92 | 329 |
| C-13G | 0.94 | 330 |
| C-13T | 0.94 | 331 |
| T-12A | 0.90 | 332 |
| T-12C | 0.97 | 333 |
| T-12G | 0.97 | 334 |
| T-11A | 0.26 | 335 |
| T-11C | 0.71 | 336 |
| T-11G | 0.69 | 337 |
| A-10C | 0.02 | 338 |
| A-10G | 0.00 | 339 |
| A-10T | 0.54 | 340 |
| T-9A | 0.95 | 341 |
| T-9C | 0.92 | 342 |
| T-9G | 0.80 | 343 |
| A-8C | 0.93 | 344 |
| A-8G | 0.81 | 345 |
| A-8T | 0.92 | 346 |
| T-7A | 0.51 | 347 |
| T-7C | 0.41 | 348 |
| T-6A | 0.08 | 349 |
| T-6C | 0.02 | 350 |
| T-6G | 0.00 | 351 |
| T-5A | 0.37 | 352 |
| T-5G | 0.24 | 353 |
| G-4A | 0.40 | 354 |
| G-4C | 0.05 | 355 |
| G-4T | 0.05 | 356 |
| C-3G | 1.07 | 357 |
| C-3T | 0.77 | 358 |
| A-2G | 0.93 | 359 |
| A-2G | 0.92 | 360 |
| A-2T | 0.80 | 361 |
| G-1A | 0.91 | 362 |
| G-1C | 0.97 | 363 |
| G-1T | 1.04 | 364 |

Heterologous Transcription by the Phage Promoter Exceeds Levels Obtainable by the Strong Native rRNA Promoter

[0244] Bacteroides harboring a cassette for expressing GFP driven by either the phage promoter (SEQ ID NO: 8) or the ribosomal RNA promoter (SEQ ID NO: 511, ggctacttttgcacccgctttccaagagaagaaagccttgataaattgacttagtgtaaaagcaagtgtctgcttaaccataagaac aaaaaaacttccgataaagtttggaagataaagctaaaagttcttatctttgcagtccgattcgcaaagaaaaggtgttacgcttttc ttctttaccttctttccctttcgctaagagagcctgaaaaacgatagaaaaagaaaaacgaaaaaaaaacttccgaaaatatttgg tagttaaaataaaacctcttacctttgcacccgcttttaaaacgaaagcaagatgttctttgaaatattgataaacaatacaagtagt acaagaaaaaaatagaaccgtcaatacttgtcttatatgtagtaatatgtatgagtcataaggtattaatgaagtcaataaattgtac ggcatcctgaacagagcaaaaatcagctttatgctgactaacaatacttttacaatgaagagtttgatcctggctcag) were grown in vitro and in vivo as described herein. To compare the strength of the phage promoter to the ribosomal RNA promoter, a native promoter that is expected to be among the most highly expressed native promoters, transcription rates of each promoter were determined via RT-qPCR as described herein. In all measured gut locations and in saturated culture conditions, transcripts produced from the phage promoter significantly exceeded those produced from the ribosomal RNA promoter (FIG. 10).

Heterologous Protein Driven by the Phage Promoter Exceeds Levels Achieved with the Strongest Native Promoters by Ten-Fold

[0245] To achieve high levels of protein expression, a strong RBS was used in addition to using a strong promoter. Strong RBSs were generated from screening an RBS library with a motif based on the RBSs found in a Bacteroides specific phage (SEQ ID NO: 375). Previously, expression of fluorescent proteins from Bacteroides has not been reported, however, use of the RBS library (SEQ ID NO: 375) increased expression from the rRNA promoter to 38% higher than background autofluorescence of unmodified cells when measured as described herein. Screening a number of additional native promoters produced higher expression, including up to a 950% increase in fluorescence relative to the autofluorescence of unmodified cells. Fluorescence from the GFP driven by the phage promoter however exceed that produced by any of the strong native promoters tested by ten-fold with an approximately 9500% increase in fluorescence relative to the autofluorescence of unmodified cells.

Heterologous Protein Expression from the Phage Promoter Produces Approximately 14,000 nM of Cytoplasmic Protein

[0246] To determine the absolute protein expression level achievable with the phage promoter, a standard curve was generated with purified luciferase protein of a known concentration and compared to luciferase driven by the phage promoters and several variants (SEQ ID NO: 1-8), as described herein. The protein concentrations from these constructs range from approximately 0.5 to 14,000 nM. Since the phage promoter is approximately ten times the strength of any measured native promoter, cytoplasmic protein concentrations of 1,400 nM or less are expected to be achievable by native promoters.

### Generating Expression Predictably Functioning Promoter Variants

[0247] Using data from the mutational analysis a set of eight constitutive promoters were created that span a 30,000-fold expression range by introducing single or multiple mutations in P_{BfP1E6} (FIG. 2e). As a complementary means of controlling expression levels, eight RBSs spanning more than 5 orders of magnitude were also generated (FIG. 2f). As protein expression level is the product of promoter and RBS strength, in combination these promoters and RBSs give a theoretical expression range of ten billion, well beyond the range of highly sensitive assays. The eight constitutive promoters in this set differ by only a few residues upstream of transcription initiation and thus are expected to function predictably when driving different protein-RBS combinations. Because core transcriptional and translational machinery is highly conserved, these expression tools should function predictably across the entire Bacteroides genus.

[0248] 56 promoter-RBS combinations were constructed (promoters of SEQ ID NOs: 2-8, in combination with RBSs of SEQ ID NOs: 11-18, in all pairwise combinations, e.g., see Table 4 above) and luciferase expression of genomically integrated constructs in four species, Bt, Bv, Bo and Bu, was measured to determine the extent of predictable expression. The expected expression level for the >200 strains was calculated by multiplying the relative promoter and RBS strengths determined in Bt (FIG. 2E-2F). A high correlation was found between expected and measured expression over a million-fold range in all four species with R² ranging from 0.95 in Bt to 0.89 in By (FIG. 3A). Additionally, the promoters produce the expected relative levels of GFP in Bt, Bv, Bo, Bf, and Bacteroides eggerthii (Be) (FIG. 12).

### Endogenous Fluorescent Imaging in the Mouse Gut

[0249] Six different Bacteroides species were engineered using the above panel of promoters to produce a unique fluorescent signature that could be imaged in vivo. One of three levels of GFP expression plus one of two levels of mCherry expression were genomically integrated into each species. Strain level differentiation in mixed communities, which is difficult using established methods such as fluorescence in situ hybridization (FISH), was achieved at the single cell level (FIG. 3B). Either the full set of six engineered species or a subset of three species were next introduced into germ-free mice. After 14 days of colonization, mice were sacrificed, distal colon sections were imaged and single-cell fluorescent profiles were quantified (FIG. 3C and FIG. 13 and FIG. 14). Comparison of the six-species and three-species communities indicated a low cell identification error (˜6%) in the six member community (FIG. 14). Transformation of fluorescent signatures enabled visual differentiation of six co-residing Bacteroides species within the gut (FIG. 3D-E). Bacteroides species differentially localized in dietary plant material within the gut at one-day post colonization (FIG. 3F), demonstrating the utility of fluorescent-protein-expressing species along with conventional staining methods in detailed investigations of spatial and temporal microbiota dynamics.

### Materials and Methods

[0250] High throughout plasmid construction, conjuration and integration. Basic part plasmids were created by cloning each part, flanked with the BsaI restriction site and 4-base overhangs specified in FIG. 4, into a standard cloning vector, pWW3056, using NotI/SbfI restriction sites. See FIG. 15 and FIG. 16 (Tables 2 and 3) for a list of oligonucleotides, basic part plasmids, and their corresponding sequences, respectively. Golden Gate reactions were carried out according to standard procedures, using any combination of basic part plasmids above, synthesized sequences, PCR products, or PNK-treated annealed oligonucleotides (annealed to generate BsaI digestion equivalent overhangs). Completed Golden Gate reactions of 4 μL were transformed with addition of 20 μL of chemically competent E. coli S17-1 cells (mid-log cells resuspended 1:20 in TSS/KCM: LB medium with 8.3% PEG-3350, 4.2% DMSO, 58 mM MgCl₂, 167 mM CaCl₂ and 457 mM KC), followed by a 90 second heat shock at 42° C., recovery at 37° C. for 30 minutes, a dilution into 600 μL LB medium with Ampicillin (150 μg/mL) in a deep well 96-well plate (Corning 07-200-700) and aerobic growth at 37° C. A Bacteroides culture was prepared with overnight anaerobic growth in trypticase yeast extract-glucose (TYG) growth medium. At mid to late log growth, 200 μL of the transformed S17-1 cells were spun down, resuspended with 10 μL of a 1:10 concentration of the Bacteroides culture, and added to a deep well 96-well plate containing 400 μL of solidified Brain Heart Infusion Blood Agar (BHI-BA) per well. After at least 16 hours, the lawn of S17-1 and Bacteroides were resuspended in 400 μL of TYG by vortex or pipetting, 200 μL of the resuspension was spun down and resuspended in 15 μL TYG and several dilutions in TYG were made. 3 μL of the resuspension and its dilutions were spotted onto a 120×120 mm square petri dish containing BHI-BA plus the appropriate antibiotics (200 μg/mL gentamycin, and 25 μg/mL erythromycin or 2 μg/mL tetracycline). Of the species tested here, Bf produces the fewest and By produces the most transformants. Bacteroides colonies can be picked after a 24 hour anaerobic incubation at 37° C.

[0251] Assessing high-throughout cloning and genomic integration pipeline success rates. The likelihood of obtaining a colony with a correctly assembled, integrated plasmid was extracted from phenotypic data (FIG. 3a). The 40 constructs that produce within 10,000-fold of the maximum expression were considered for each of the four species. Four biological replicate Bacteroides colonies were picked for each construct within each species, and each was expected to be derived from a uniquely generated plasmid since conjugation to E. coli transformants was performed in batch. Replicates with a deviation from the median by at least an order of magnitude were considered to be incorrectly assembled. All such misassembles were at least 50-fold lower than expected and close to background levels of luminescence. Samples with substantially lower growth as determined by OD_{600 nm} were excluded from the analysis, although inclusion of wells with little or no growth only substantially impacted By calculations with a reduction to 90% correct.

[0252] Culture reporter expression and fluorescent assays. To assay Bacteroides strain reporter activity, glycerol stocks of Bacteroides strains were streaked out on BHI blood agar plates with the appropriate antibiotics (200 μg/mL gentamycin, and 25 μg/mL erythromycin or 2 μg/mL tetracycline), and after a 24-30 hour anaerobic incubation at 37° C., at least 3 colonies were picked into TYG with antibiotics (25 μg/mL erythromycin or 2 μg/mL tetracycline) and grown anaerobically at 37° C. for 14-20 hours. Endogenous fluorescence from super-folding GFP and mCherry was measured after twice spinning cultures down and resuspending in PBS followed by oxygen exposure for at least 60 minutes. The Nano-Glo Luciferase Assay System (Promega) was used for luciferase assays. Fluorescence, OD₆₀₀ and luminescence readings were taken on a TECAN Infinite 200 PRO microplate reader with a 5 nm band pass excitation/emission of 488/510 and 580/610 nm for GFP and mCherry respectively.

[0253] Gnotobiotic mouse experiments. Mouse experiments in this study were performed in strict accordance with a Protocol for Care and Use of Laboratory Animals approved by the Stanford University Administrative Panel of Laboratory Animal Care. Germ-free Swiss Webster mice (Taconic) were maintained in gnotobiotic isolators on a 12 hour light cycle and fed ad libitum a standard autoclaved chow diet (LabDiet 5K67). Mice were inoculated via oral gavage with ˜10⁸ total Bacteroides CFU, either a single strain or equal proportions of mixed strains. Fecal pellets were plated on BHI-BA with gentamycin and erythromycin, grown at least 24 hours, and individual colonies were picked for fluorescent assay based enumeration. After one day (FIG. 3f), 2 weeks (FIG. 3d-h) or 10 weeks (FIG. 2c) mice were sacrificed using CO₂ asphyxiation and cervical dislocation in accordance with approved protocols and tissue was immediately harvested and processed as described below.

[0254] Fitness assays. Culture fitness assays were conducted by streaking out glycerol stocks of GFP expressing or non-expressing Bt, picking two colonies of each and growing in TYG+erythromycin (25 μg/mL) overnight, subculturing each strain and growing to mid-log, and then independently combining the two sets of cultures at a 1:1 ratio followed by growth to stationary phase. Each day for 4 days the cultures were subsequently diluted 1:100 for overnight growth, then diluted 1:50 and sampled at mid-log during growth to stationary phase. At each mid-log timepoint, the cultures were sampled, centrifuged at 14,000×g, resuspended in an equal volume of PBS, and assayed for bulk GFP fluorescence relative to purely GFP-expressing or non-expressing cultures. In vivo fitness experiments were conducted by similarly preparing a mix of the two strains from overnight culture, and inoculating and maintaining mice as described above. Bacterial densities were determined using serial dilution of samples taken from fecal pellets of each mouse three times a week. Forty-eight colonies for each mouse at each timepoint were picked and assayed for fluorescence as described above and weekly data was averaged for each mouse to provide an average proportion of GFP expressing Bt for each mouse each week.

[0255] Transcript measurements. RNA was isolated with RNeasy kits (Qiagen) applied to either cecal or fecal contents treated with phenol-chloroform and bead beating, or cultures were treated with RNAprotect (Qiagen) and lysozyme as previously described. RNA was converted to cDNA with Superscript II (Invitrogen) followed by qRT-PCR analysis with SYBR Green (ABgene) in an MX3000P thermocycler (Stratagene). The normalized transcript levels, GFP/16S, were determined by amplification of GFP and 16S, with primers tggtgttcagtgctttgctc (SEQ ID NO: 376)/agctcaatgcggtttaccag (SEQ ID NO: 377) and cgttccattaggcagttggt (SEQ ID NO: 378)/caacccatagggcagtcatc (SEQ ID NO: 379) respectively.

[0256] Mutational analysis of phage promoter. For each promoter variant assayed, a unique strain was generated, as described above, using a three-piece Golden Gate assembly of a pair of PNK treated annealed oligonucleotides manufactured by Integrated DNA Technologies (typically two 28-base-pair oligonucleotides) containing the specific mutation, combined with upstream and downstream plasmid parts to create an expression plasmid identical to pWW3452 but with a single promoter mutation. The assembly and integration process was repeated three independent times to better identify outliers in expression due to errors in plasmid synthesis. All strains producing less than 75% the native promoter activity were sequence verified with PCR from genomic DNA and Sanger sequencing. 98% of the verified mutations outside of the highlighted regions of importance (FIG. 2d) produced over 75% of P_{BfP1E6}-driven fluorescence.

[0257] Absolute luciferase expression quantification. A standard curve for quantifying luciferase concentration was produced using purified luciferase protein (Promega; NanoLuc-Halotag Protein, 100 μg; tem #: CS188401). The luciferase protein (8 μg/μl; 54.2 kDa) was diluted either 1:2,000 or 1:20,000 into PBS+BSA, and serially diluted (1:4) in PBS+BSA. Luminescence was measured with Nano-Glo Luciferase Assay System (Promega), and dilutions of between 8×10³ and 8.2×10⁷ produced reading within the linear range (FIG. 11b). Simultaneously, cultures were grown in triplicate and similarly assayed for luciferase as described above, as well as plated giving on average 5×10⁶ CFU/μl. Cells harboring the strongest phage promoter when diluted 1:400 produced luminescence corresponding to 10 μg/μl (0.18 nM) of purified protein. Assuming an intracellular volume of approximately 1 μm³, corresponding to an intracellular volume of 0.5% of the culture volume, the intracellular concentration of luciferase is expected to be approximately 14 μM (calculated as: 0.18 nM×400/0.5%). Concentrations for the strains harboring the other seven promoters was similarly calculated and plotted in FIG. 11c.

[0258] Tissue Preparation and microscopy. Harvested tissues were immediately transferred to a 4% paraformaldehyde solution in PBS for a 48 hour fixation. Samples were then embedded in O.C.T. Compound (Tissue-Tek) and sectioned to either 4 μm (FIG. 2c) or 100 μm thickness (FIG. 3d-f) on a Leica CM3050 S cryostat. 4 μm sections were fully dried; 100 μm sections were immediately processed without drying. All samples were stained for 45 minutes with 4′,6-Diamidino-2-phenylindole dihydrochloride (DAPI; Sigma-Aldrich) and Alexa Fluor 594 Phalloidin (Life Technologies), and 100 μm sections were also stained with Fluorescein labeled Ulex Europaeus Agglutinin I (UEAI; Vector Laboratories), followed by a PBS wash and mounting in VECTASHIELD (Vector Laboratories). Images were taken on a Zeiss LSM 700 confocal microscope using lambda mode to obtain independent spectral profiles for each of the 488 nm, 555 nm and 639 nm lasers.

[0259] Image processing and transformation. Linear unmixing was applied to each spectral profile independently to separate the following channels: DAPI, GFP, UEAI, mCherry, and Phalloidin for FIG. 2c-e, and DAPI, GFP, mCherry and autofluorescent plant material for FIG. 2f. Linear deconvolution was applied (ImageJ plugin Diffraction PSF 3D by Bob Dougherty) to all channels except UEAI and plant material, and the default ImageJ despeckling plugin was applied. To generate the single cell expression profiles (FIG. 3b-c), the deconvolved DAPI image was thresholded, a mask was generated for lumen-side objects of approximately bacteria size (0.1 to 1 μm²), and a watershed algorithm was applied to help separate contacting cells. Then the average GFP and mCherry value was determined for each object (single bacteria cell) and plotted with Matlab. To visually distinguish log-separated GFP values, thresholds were chosen based on the GFP/mCherry single-cell fluorescent profiles, to transform the following GFP/mCherry categories to unique colors: low/low=blue; medium/low=cyan; high/low=green; low/high=red: medium/high=orange; high/high=yellow. Additionally, to better visualize ambiguity in category calls, values within 1.75-fold and 6-fold of the GFP and RFP thresholds, respectively, are colored grey. Each pixel was independently transformed to the value determined by the GFP/mCherry category, multiplied by the DAPR value, and overlaid with the UEAI and Phalloidin channels (FIG. 2d-e) or plant material (FIG. 2f). Cells containing more than 25% pixels of another category or near threshold values (grey pixels) are considered to be ambiguous calls.

### Example 2: Promoter Tests

[0260] Assays were performed to test the ability of various sequences to function as promoters in Bacteroides cells (see Table 6 and Table 7 for results).

TABLE 6
Promoter activity assay. Promoter “P6” refers to the phage promoter identified in
Example 1 above, and SEQ ID NOs: 388-394 are various truncated versions of the promoter
sequence of SEQ ID NO: 8. The underlined nucleotides are those that are added relative to
the sequence of SEQ ID NO: 399. P5 is a different phage promoter sequence identified
during the experiments described in Example 1 above.

| | Avg | 95% | Length | | SEQ |
|---|---|---|---|---|---|
| Promoter | Activity | Cl | (nt) | Sequence | ID NO |
| blank cells | 1.0 | 0.1 | 0 | | |
| P6(−36, +1) | 1.1 | 0.0 | 37 | cacttgaactttcaaataatgttcttatatttgcagt | 399 |
| P6(−54, +1) | 6.2 | 1.3 | 55 | tgtttaaaatttaaagtttcacttgaactttcaaataatgttcttata | 389 |
| | | | | tttgcagt | |
| P6(−56, +1) | 4.7 | 0.4 | 57 | attgttaaaatttaaagtttcacttgaactttcaaataatgttctta | 390 |
| | | | | tatttgcagt | |
| P6(−46, +17) | 6.2 | 0.1 | 63 | tttaaagtttcacttgaactttcaaataatgttcttatatttgcagt | 391 |
| | | | | gtcgaaagaaacaaag | |
| P6(−56, +17) | 5.8 | 0.3 | 73 | attgttaaaatttaaagtttcacttgaactttcaaataatgttctta | 392 |
| | | | | tatttgcagtgtcgaaagaaacaaag | |
| P6(−74, +1) | 6.5 | 0.2 | 75 | gtttgcaatggttaatctattgttaaaatttaaagtttcacttgaa | 393 |
| | | | | ctttcaaataatgttcttatatttgcagt | |
| P6(−74, +17) | 16.6 | 1.2 | 91 | gtttgcaatggttaatctattgttaaaatttaaagtttcacttgaa | 388 |
| | | | | ctttcaaataatgttcttatatttgcagtgtcgaaagaaacaaa | |
| | | | | g | |
| P6(−93, +20) | 8.8 | 0.2 | 114 | gactaccttttttttgttttgtttgcaatggttaatctattgttaaaatt | 394 |
| | | | | taaagtttcacttgaactttcaaataatgttcttatatttgcagtgt | |
| | | | | cgaaagaaacaaagtag | |
| P5(−54, +1) | 4.3 | 0.1 | 55 | agttaatgcacgttaaagtatttgctactgagaaatatatccgt | 405 |
| | | | | atatttgcagt | |
| P5(−93, +20) | 8.7 | 0.3 | 114 | gagtaactacgataataaagtgataattcaatgttaaaaca | 406 |
| | | | | gttaatgcacgttaaagtatttgctactgagaaatatatccgta | |
| | | | | tatttgcagcgtagaagttattactaacg | |
| P5(−74, +17) | Not | | 91 | tgataattcaatgttaaaacagttaatgcacgttaaagtatttg | 407 |
| | tested | | | ctactgagaaatatatccgtatatttgcagcgtagaagttatta | |
| | | | | cta | |

TABLE 7
Promoter activity assay. Promoter “P6” refers to the phage promoter identified in
Example 1, and SEQ ID NOs: 395-397 are various truncated versions of the promoter
sequence of SEQ ID NO: 8. The underlined nucleotides are those that are added relative to
the sequence of SEQ ID NO: 399 (see Table 6). Note: the results of Table 7 are not directly
comparable to those of Table 6. Thus, direct comparisons can be made within each table,
but not across tables.

| | Avg | 95% | Length | | |
|---|---|---|---|---|---|
| Promoter | Activity | Cl | (nt) | Sequence | SEQ ID NO |
| blank cells | 1.0 | 0.0 | 0 | | |
| P6(−40, +20) | 3.4 | 1.0 | 60 | gtttcacttgaactttcaaataatgttcttatatttgcagtg | 395 |
| | | | | tcgaaagaaacaaagtag | |
| P6(−60, +20) | 20.8 | 4.7 | 80 | atctattgttaaaatttaaagtttcacttgaactttcaaat | 396 |
| | | | | aatgttcttatatttgcagtgtcgaaagaaacaaagta | |
| | | | | g | |
| P6(−80, +20) | 50.8 | 8.6 | 100 | tgttttgtttgcaatggttaatctattgttaaaatttaaagtt | 397 |
| | | | | tcacttgaactttcaaataatgttcttatatttgcagtgtc | |
| | | | | gaaagaaacaaagtag | |
| P6(−100, +20) | 57.8 | 2.6 | 120 | caattgggctaccttttttttgttttgtttgcaatggttatct | 8 |
| | | | | attgttaaaatttaaagtttcacttgaactttcaaataat | |
| | | | | gttcttatatttgcagtgtcgaaagaaacaaagtag | |

### Example 3: Promoter Function in Multiple Different Cells

[0261] FIG. 20 demonstrates that a subject promoter that is operable in Bacteroides cells can also be operable in other types of prokaryotic cells (e.g., an E. coli cells). Thus, in some cases, a subject promoter, in addition to being operable in Bacteroides cells, is also operable in non-Bacteroides cells (e.g., prokaryotic cells such as E. coli cells). FIG. 20 depicts E. coli cells expressing a GFP transgene that is operably linked to the promoter of SEQ ID NO: 388 (which is demonstrated herein to be operable in Bacteroides cells, and also in E. coli cells).

### Example 4: Cleavable Linkers Tested for Secreted Fusion Proteins

[0262] To develop a peptide secretion strategy, proteins were identified that function across the Bacteroides genus to secrete tethered peptides. Peptides tethered by linkers designed to be cleaved by gut proteases were cleanly released.

### Results

### Peptide Secretion Strategy

[0263] In addition to the high-throughput strain modification and strong, predictable protein expression methods developed here, it was desired to further expand the repertoire of tools available for engineering gut-resident prokaryotic species (e.g., Bacteroides species). Reliable means of heterologous protein secretion in gram-negative bacteria are lacking, and previously described signal sequence were unable to direct proteins of interest outside of cells. In order to take advantage of native protein secretion in the Bacteroides, a mass spectrometry-based proteomics assay was performed to determine natural secreted proteins from B. thetaiotaomicron (FIG. 17). Multiple candidate-secreted proteins were cloned under strong constitutive expression, using native RBSs, with a C-terminal triple FLAG tag and tested for soluble secretion into the media. Many proteins were identified to be secreted via outer membrane vesicle (OMVs), some having been identified in a recently published study on Bacteroides OMVs, and one candidate (product of hypothetical ORF BT_0525) was identified to be secreted as a soluble protein into the cell culture medium using a carefully designed Western blot technique to account for cell lysis when analyzing protein secretion. To develop BT0525 (SEQ ID NO: 459) as a generalizable tool for protein secretion in the Bacteroides, secretion of a protein from the six Bacteroides species used above (which, as described above, were used to test variations of P_{BfP1E6}) was attempted. The same strong, constitutively expressed and FLAG-tagged version of BT0525 that was used to confirm soluble secretion in B. theta, was chromosomally inserted into the other six species. Translatability of secretion of BT0525 into the culture supernatant across divergent members of the Bacteroides genus was demonstrated (FIG. 17b). Using this broadly applicable carrier protein, a system was designed to deliver peptide cargo from Bacteroides cells into the gut milieu. Because the gastrointestinal tract is rich with proteases, linkers were used to connect the peptide cargo to the carrier protein with motifs that could be targeted by common gut proteases (FIG. 17c). It was next experimentally demonstrated that B. thetaiotaomicron grown in vitro can secrete a 30 amino acid 6× His/3×FLAG tag (HHHHHH-GG-DYKDHDG-DYKDHDI-DYKDDDDK) (SEQ ID NO: 410) cargo peptide, and that the cargo was released upon treatment with extract from murine cecal contents (FIG. 17c). When the linker was mutated at the predicted amino acid cleavage site, the peptide cargo is no longer released upon treatment with cecal extract.

[0264] FIG. 22. Bt secretes proteins via OMVs. When secreted protein candidates were cloned under constitutive expression with a 3×FLAG tag and cell pellet (P), cell-free culture supernatant (S), ultracentrifuged S to remove OMVs (U), and recovered OMVs (0) were analyzed via western blot, protein products of BT1488 and BT3742 localized to OMVs (presence of BT3742 in the ultracentrifuged supernatant is accounted for by lysis) while BT0525 localized mainly to the cell-free supernatant.

[0265] FIG. 23 Diverse species of Bacteroides secrete BT0525. Western blot analysis of By, Bu, and Be strains expressing sfGFP and BT0525, each under P_{BfP1E6} and with a 3×FLAG tag. Cell pellets show expression of both proteins, while culture supernatants demonstrate secretion of BT0525 independent of lysis. These three species of Bacteroides are able to accumulate more BT0525 signal in the supernatant than Bt, Bf, or Bo for unknown reasons. This could be due to differential expression of secretion machinery, degradation machinery in the periplasm or at the cell membrane, or of proteases that are released extracellularly.

### Materials and Methods

[0266] Secreted protein proteomics. Wild-type Bt was grown in 150 mL Salyer's Minimal Media+glucose in triplicate, anaerobically at 37° C. to mid-log. Cultures were centrifuged at 2700 g for 20 minutes to pellet the cells. Culture supernatant was then filter sterilized with a 0.2 μm filter (Corning), concentrated 300× with 10 k Centriprep centrifugal concentrator tubes (Millipore), and buffer exchanged into 50 mM Tris at a pH of 8. A 1 mL aliquot of cell pellet was resuspended in 1 mL urea lysis buffer+protease inhibitor (Roche). Cell pellet and culture supernatant were each run on an SDS-PAGE gel and stained with Coomassie to visualize protein banding patterns in each fraction. The same samples were then analyzed by GC-MS [more info here on how Josh did this and analyzed the data?] and reads were mapped back to the Bt protein database and identified by predicted ORF. The average reads in the cell pellet and culture supernatant for individual proteins found in two of the three replicates were plotted with standard deviation to visualize representation in each cell fraction.

[0267] Western blot analysis of secreted proteins. To differentiate between protein in the cell culture supernatant due to active secretion as compared to cell lysis, a control Bt strain expressing genomically integrated 3×FLAG-tagged superfolder GFP (which folds too efficiently to be secreted, allowing GFP signal in the supernatant to act as a proxy for cell lysis) was developed. Candidate proteins of interest were then cloned under PBfP1E6 and their native RBS with a C-terminal 3×FLAG tag, and genomically integrated into the lysis control strain. For testing secretion of BT0525 in diverse Bacteroides species, the GFP lysis control plasmid was subcloned into the BT0525 expression plasmid via BamHI/XbaI and BgllI/SpeI sites and the resulting construct was genomically integrated into Bt, Bf, Bv, Bu, Bo, and Be, as Be appeared unable to accept two separate plasmids. All strains tested for protein secretion were grown to mid-log in either Salyer's Minimal Media+glucose or in TYG. Cultures were centrifuged at 8000 g in a tabletop centrifuge for 10 minutes, culture supernatant was harvested, and cell pellet was resuspended in PBS at the original volume. To test for secretion via OMVs, culture supernatants were filter sterilized with a 0.2 μm filter (Corning), 44 mL were centrifuged in a 70Ti rotor in a Beckman Coulter Optima L-90K ultracentrifuge at 37 k rpm and 4° C. for 2 hours, washed in PBS, and OMV pellets were resuspended in 1 mL PBS. Cell pellet fractions were diluted 1:20 in PBS to achieve linear-range visualization on the western blot, and run with undiluted supernatant samples on SDS-PAGE gels. Samples were blotted onto nitrocellulose membranes using the iBlot dry transfer system (Life Technologies), and stained with an anti-FLAG HRP-conjugated antibody (Sigma).

[0268] Peptide release via cleavable linkers. Strains of Bt expressing BT0525 linked to a 6×His-3×FLAG tag via designed linkers were grown overnight in TYG. Cultures were centrifuged at 8000 g for 10 minutes, and supernatant was harvested. Supernatant was exposed to either PBS or increasing concentrations of cecal extract (liquid fraction of centrifuged murine cecal contents from conventional mice) for 10 minutes at 37° C. Digestion was immediately stopped by addition of reducing SDS-PAGE sample buffer and heat treatment at 70° C. for 10 minutes. Samples were analyzed via western blotting as described above.

Table 11 provides data from testing a number of cleavable linkers positioned between a polypeptide of interest and a secreted Bacteroides protein (BT0525) (SEQ ID NO: 459). A nucleotide sequence of interest encoding the fusion protein (the secreted Bacteroides protein fused to the polypeptide of interest) was place under the control of a subject promoter (operable in Bacteroides cells) and the nucleic acid was integrated in the genome of a Bacteroides cell. The secreted fusion protein was then collected and assayed to determine whether the linker was cleaved.

TABLE 11
The cleavable linkers of Table 10 were tested for their ability to function.

| | Amino acid | | | Cleavage | |
|---|---|---|---|---|---|
| | sequence | | | observed | |
| | (cleavage at bold | Target | Secretion | by gut | SEQ ID |
| Linkers: | amino acid) | peptidase | detected | contents? | NO |
| CL0 | GSGSSGGS | Control | High | No | 420 |
| | | (no cleavage | | | |
| | | expected) | | | |
| CL1 | SGPTGHGR | Trypsin | Moderate | Yes | 422 |
| CL2 | SGPTGMAR | Trypsin | Weak | Yes | 423 |
| CL3 | SGPTASPL | Chymotrypsin | High | Yes | 424 |
| CL4 | SGPTTAPF | Chymotrypsin B | High | Yes | 425 |
| CL5 | SGPTAAPA | Elastase 1 | High | Yes | 426 |
| CL4x | SGPTTAPG | Control | High | No | 421 |
| | | (no cleavage | | | |
| | | expected) | | | |

### Example 5: Polypeptides of Interest are Assayed for their Ability to Treat Colitis in Mice

[0269] The data presented herein show that combining these tools, two anti-inflammatory peptides were successfully delivered to mice with colitis, and these delivered peptides successfully treated murine colitis.

### Results

[0270] To test the efficacy of this peptide delivery system in vivo, the ability of Bt secreting BT0525 linked to anti-inflammatory peptides to offset the effects of DSS-induced colitis in mice was examined. Male germ free mice were colonized with a model community of three representative organisms: Clostridium scindens, Edwardsiella tarda, and Bacteroides vulgatus. After allowing two weeks for community equilibration, the mice were switched to 5% DSS in the drinking water to induce colitis. Simultaneously, Bt secreting one of three anti-inflammatory peptides (AIP)—FpMAM-pep5 (SEQ ID NO: 412), 101.10 (SEQ ID NO: 411), or KPV (SEQ ID NO: 415)—via cleavable linkage to BT0525 expressed with PBfP1E6 was administered. Weight of the mice was monitored for nine days, and Disease Activity Index (DAI) was measured at sacrifice on day nine. Mice receiving either FpMAM-pep5 or 101.10 lost significantly less weight than mice that did not receive treatment (FIG. 18a), and demonstrated significantly lower DAI scores than mice that received KPV (FIG. 18b). This was similarly repeated for FpMAM-pep5 delivery in conventional mice via daily oral gavage, and also exhibited a significant alleviation of DSS-induced weight loss. This demonstrates the collection of tools developed here function in the gut, delivering enough anti-inflammatory peptides to significantly impact host physiology.

### Materials and Methods

[0271] Mouse colitis treatment experiment. Male, Germ-free Swiss Webster mice (Taconic) were orally gavaged with an equal mixture of Edwardsiella tarda, Clostridium scindens, and Bacteroides vulgatus from overnight culture. After two weeks of community equilibration, mice were switched to 5% Dextran Sodium Sulfate (Affymetrix) in the drinking water. They were simultaneously orally gavaged with ˜10 CFU of a 1:1:1 mix of Bt expressing an anti-inflammatory peptide linked to BT0525 via cleavable linkers 1, 3, and 4 (SUPP), and were grouped as follows: FpMAM-pep5 (n=4), 101.10 (n=3), or KPV (n=4). Mice were weighed each day for nine days, and sacrificed on day nine. At sacrifice, stool consistency, blood in the stool (Hemoccult SENSA, Beckman Coulter), and final weight were measured to calculate the Disease Activity Index. The same experiment was performed using 5 female mice that received no treatment, as a baseline measurement of response of weight to DSS.

[0272] Table 12 provides data from testing whether various therapeutic peptides could be used as polypeptides of interest to treat colitis in mice. The indicated peptide was fused to a secreted Bacteroides protein (BT0525) (SEQ ID NO: 459) with a cleavage linker (cleavable by gut proteases) positioned between them. A nucleotide sequence of interest encoding the fusion protein (the secreted Bacteroides protein fused to the indicated peptide) was place under the control of a subject promoter (operable in Bacteroides cells) and the nucleic acid was integrated into the genome of Bacteroides cells. The Bacteroides cells were then introduced into the guts of mice. The mice were injected with DSS (a mouse model of colitis) and the effect of the introduced bacteria (secreted the fusion protein) on colitis was assayed.

TABLE 12
The peptides of Table 12 were tested for
their ability to impact DSS-induced colitis in mice.

| | SEQ | | Significant |
|---|---|---|---|
| Peptide | ID NO | Type | effect in mice |
| 101.10 | 411 | IL-1 inhibitory | Yes—reduced |
| | | peptides | disease |
| Fp MAM- | 412 | anti-NF-κB | Yes—reduced |
| pep5 | | | disease |
| CD80-CAP1 | 413 | CD80 antagonistoc | *Yes—negative |
| | | peptide | impact, likely due |
| | | | to too high a dose |
| Pep2305 | 414 | IL-23 inhibitory | No |
| | | peptides | |
| KPV | 415 | NF-kB and MAPK | No |
| | | inhibition | |
| WP9QY | 416 | anti-TNF | No |
| P144 | 417 | TGF-b inhibitory | No |
| | | peptide | |

*Various different reduced doses can be now be routinely and systematically tested, e.g., using the promoters presented herein that have a wide variety of strengths.

[0273] The preceding merely illustrates the principles of the invention. It will be appreciated that those skilled in the art will be able to devise various arrangements which, although not explicitly described or shown herein, embody the principles of the invention and are included within its spirit and scope. Furthermore, all examples and conditional language recited herein are principally intended to aid the reader in understanding the principles of the invention and the concepts contributed by the inventors to furthering the art, and are to be construed as being without limitation to such specifically recited examples and conditions. Moreover, all statements herein reciting principles, aspects, and embodiments of the invention as well as specific examples thereof, are intended to encompass both structural and functional equivalents thereof. Additionally, it is intended that such equivalents include both currently known equivalents and equivalents developed in the future, i.e., any elements developed that perform the same function, regardless of structure. The scope of the present invention, therefore, is not intended to be limited to the exemplary embodiments shown and described herein. Rather, the scope and spirit of the present invention is embodied by the appended claims.

The application's sequence listing, which the Patent Office published only in electronic form, follows.

SEQUENCE LISTING (511 sequences)

SEQ ID NO: 1 - DNA, 120 bp, Artificial sequence
  Synthetic sequence
caattgggctaccttttttttgtaaaaaaaaaccccgcccctgacagggcggggttttttttttcacttgaactttcaaataatgttcttataaaaccagtgtcgaaagaaacaaagtag

SEQ ID NO: 2 - DNA, 120 bp, Artificial sequence
  Synthetic sequence
caattgggctaccttttttttgtaaaaaaaaaccccgcccctgacagggcggggttttttttttcacttgaactttcaaataatgttcttatatatgcagtgtcgaaagaaacaaagtag

SEQ ID NO: 3 - DNA, 120 bp, Artificial sequence
  Synthetic sequence
caattgggctaccttttttttgttttgtttgcaatggttaatctattgttaaaatttaaagtttcacttgaactttcaaataatgttcttatatgtgcagtgtcgaaagaaacaaagtag

SEQ ID NO: 4 - DNA, 120 bp, Artificial sequence
  Synthetic sequence
caattgggctaccttttttttgttttgtttgcaatggttaatctattgttaacatttaaagtttcacttgaactttcaaataatgttcttatattttcagtgtcgaaagaaacaaagtag

SEQ ID NO: 5 - DNA, 120 bp, Artificial sequence
  Synthetic sequence
caattgggctaccttttttttgttttgtttgcaatggttaatctattgttaaaatttaaagtttcacttgaactttcaaataatgttcttctatttgcagtgtcgaaagaaacaaagtag

SEQ ID NO: 6 - DNA, 120 bp, Artificial sequence
  Synthetic sequence
caattgggctaccttttttttgttttgtttgcaatggttaatctattgttaaaatttaaagtttcacttgaactttcaaataatgttcttatatttccagtgtcgaaagaaacaaagtag

SEQ ID NO: 7 - DNA, 120 bp, Artificial sequence
  Synthetic sequence
caattgggctaccttttttttgttttgtttgcaatggttaatctattgttgaaatttaaagtttcacttgaactttcaaataatgttcttatatttgcagtgtcgaaagaaacaaagtag

SEQ ID NO: 8 - DNA, 120 bp, Artificial Sequence
  synthetic sequence
caattgggctaccttttttttgttttgtttgcaatggttaatctattgttaaaatttaaagtttcacttgaactttcaaataatgttcttatatttgcagtgtcgaaagaaacaaagtag

SEQ ID NO: 9 - DNA, 17 bp, Artificial sequence
  Synthetic sequence
aaaaaaaaaaaaaaaaa

SEQ ID NO: 10 - DNA, 36 bp, Artificial sequence
  Synthetic sequence
gactgatctatggattcaaaaaaatttaaaataatg

SEQ ID NO: 11 - DNA, 36 bp, Artificial sequence
  Synthetic sequence
gactgatcggcgcgactcacgcgccgatcagtaatg

SEQ ID NO: 12 - DNA, 36 bp, Artificial sequence
  Synthetic sequence
gactgatcgggaggagtaaaaaatattaaaataatg

SEQ ID NO: 13 - DNA, 36 bp, Artificial sequence
  Synthetic sequence
gactgatctctggggtgaataaaatttataataatg

SEQ ID NO: 14 - DNA, 36 bp, Artificial sequence
  Synthetic sequence
gactgatcccccattctattaaattttagaataatg

SEQ ID NO: 15 - DNA, 36 bp, Artificial sequence
  Synthetic sequence
gactgatcggtgttagctttaaatattagaataatg

SEQ ID NO: 16 - DNA, 36 bp, Artificial sequence
  Synthetic sequence
gactgatctagcactcttaaaaaaattaaaataatg

SEQ ID NO: 17 - DNA, 36 bp, Artificial sequence
  Synthetic sequence
gactgatcgtaatctttaaaaaaaataaaaataatg

SEQ ID NO: 18 - DNA, 36 bp, Artificial sequence
  Synthetic sequence
gactgatcgtccatcaatttaaaatttaaaataatg

SEQ ID NO: 19 - DNA, 17 bp, Artificial sequence
  Synthetic sequence
aaaaaaaaaaaaaaaaa

SEQ ID NO: 20 - DNA, 156 bp, Artificial sequence
  Synthetic sequence
caattgggctaccttttttttgtaaaaaaaaaccccgcccctgacagggcggggttttttttttcacttgaactttcaaataatgttcttataaaaccagtgtcgaaagaaacaaagtaggactgatcggcgcgactcacgcgccgatcagtaatg

SEQ ID NO: 21 - DNA, 156 bp, Artificial sequence
  Synthetic sequence
caattgggctaccttttttttgtaaaaaaaaaccccgcccctgacagggcggggttttttttttcacttgaactttcaaataatgttcttataaaaccagtgtcgaaagaaacaaagtaggactgatcgggaggagtaaaaaatattaaaataatg

SEQ ID NO: 22 - DNA, 156 bp, Artificial sequence
  Synthetic sequence
caattgggctaccttttttttgtaaaaaaaaaccccgcccctgacagggcggggttttttttttcacttgaactttcaaataatgttcttataaaaccagtgtcgaaagaaacaaagtaggactgatctctggggtgaataaaatttataataatg

SEQ ID NO: 23 - DNA, 156 bp, Artificial sequence
  Synthetic sequence
caattgggctaccttttttttgtaaaaaaaaaccccgcccctgacagggcggggttttttttttcacttgaactttcaaataatgttcttataaaaccagtgtcgaaagaaacaaagtaggactgatcccccattctattaaattttagaataatg

SEQ ID NO: 24 - DNA, 156 bp, Artificial sequence
  Synthetic sequence
caattgggctaccttttttttgtaaaaaaaaaccccgcccctgacagggcggggttttttttttcacttgaactttcaaataatgttcttataaaaccagtgtcgaaagaaacaaagtaggactgatcggtgttagctttaaatattagaataatg

SEQ ID NO: 25 - DNA, 156 bp, Artificial sequence
  Synthetic sequence
caattgggctaccttttttttgtaaaaaaaaaccccgcccctgacagggcggggttttttttttcacttgaactttcaaataatgttcttataaaaccagtgtcgaaagaaacaaagtaggactgatctagcactcttaaaaaaattaaaataatg

SEQ ID NO: 26 - DNA, 156 bp, Artificial sequence
  Synthetic sequence
caattgggctaccttttttttgtaaaaaaaaaccccgcccctgacagggcggggttttttttttcacttgaactttcaaataatgttcttataaaaccagtgtcgaaagaaacaaagtaggactgatcgtaatctttaaaaaaaataaaaataatg

SEQ ID NO: 27 - DNA, 156 bp, Artificial sequence
  Synthetic sequence
caattgggctaccttttttttgtaaaaaaaaaccccgcccctgacagggcggggttttttttttcacttgaactttcaaataatgttcttataaaaccagtgtcgaaagaaacaaagtaggactgatcgtccatcaatttaaaatttaaaataatg

SEQ ID NO: 28 - DNA, 156 bp, Artificial sequence
  Synthetic sequence
caattgggctaccttttttttgtaaaaaaaaaccccgcccctgacagggcggggttttttttttcacttgaactttcaaataatgttcttatatatgcagtgtcgaaagaaacaaagtaggactgatcggcgcgactcacgcgccgatcagtaatg

SEQ ID NO: 29 - DNA, 156 bp, Artificial sequence
  Synthetic sequence
caattgggctaccttttttttgtaaaaaaaaaccccgcccctgacagggcggggttttttttttcacttgaactttcaaataatgttcttatatatgcagtgtcgaaagaaacaaagtaggactgatcgggaggagtaaaaaatattaaaataatg

SEQ ID NO: 30 - DNA, 156 bp, Artificial sequence
  Synthetic sequence
caattgggctaccttttttttgtaaaaaaaaaccccgcccctgacagggcggggttttttttttcacttgaactttcaaataatgttcttatatatgcagtgtcgaaagaaacaaagtaggactgatctctggggtgaataaaatttataataatg

SEQ ID NO: 31 - DNA, 156 bp, Artificial sequence
  Synthetic sequence
caattgggctaccttttttttgtaaaaaaaaaccccgcccctgacagggcggggttttttttttcacttgaactttcaaataatgttcttatatatgcagtgtcgaaagaaacaaagtaggactgatcccccattctattaaattttagaataatg

SEQ ID NO: 32 - DNA, 156 bp, Artificial sequence
  Synthetic sequence
caattgggctaccttttttttgtaaaaaaaaaccccgcccctgacagggcggggttttttttttcacttgaactttcaaataatgttcttatatatgcagtgtcgaaagaaacaaagtaggactgatcggtgttagctttaaatattagaataatg

SEQ ID NO: 33 - DNA, 156 bp, Artificial sequence
  Synthetic sequence
caattgggctaccttttttttgtaaaaaaaaaccccgcccctgacagggcggggttttttttttcacttgaactttcaaataatgttcttatatatgcagtgtcgaaagaaacaaagtaggactgatctagcactcttaaaaaaattaaaataatg

SEQ ID NO: 34 - DNA, 156 bp, Artificial sequence
  Synthetic sequence
caattgggctaccttttttttgtaaaaaaaaaccccgcccctgacagggcggggttttttttttcacttgaactttcaaataatgttcttatatatgcagtgtcgaaagaaacaaagtaggactgatcgtaatctttaaaaaaaataaaaataatg

SEQ ID NO: 35 - DNA, 156 bp, Artificial sequence
  Synthetic sequence
caattgggctaccttttttttgtaaaaaaaaaccccgcccctgacagggcggggttttttttttcacttgaactttcaaataatgttcttatatatgcagtgtcgaaagaaacaaagtaggactgatcgtccatcaatttaaaatttaaaataatg

SEQ ID NO: 36 - DNA, 156 bp, Artificial sequence
  Synthetic sequence
caattgggctaccttttttttgttttgtttgcaatggttaatctattgttaaaatttaaagtttcacttgaactttcaaataatgttcttatatgtgcagtgtcgaaagaaacaaagtaggactgatcggcgcgactcacgcgccgatcagtaatg

SEQ ID NO: 37 - DNA, 156 bp, Artificial sequence
  Synthetic sequence
caattgggctaccttttttttgttttgtttgcaatggttaatctattgttaaaatttaaagtttcacttgaactttcaaataatgttcttatatgtgcagtgtcgaaagaaacaaagtaggactgatcgggaggagtaaaaaatattaaaataatg

SEQ ID NO: 38 - DNA, 156 bp, Artificial sequence
  Synthetic sequence
caattgggctaccttttttttgttttgtttgcaatggttaatctattgttaaaatttaaagtttcacttgaactttcaaataatgttcttatatgtgcagtgtcgaaagaaacaaagtaggactgatctctggggtgaataaaatttataataatg

SEQ ID NO: 39 - DNA, 156 bp, Artificial sequence
  Synthetic sequence
caattgggctaccttttttttgttttgtttgcaatggttaatctattgttaaaatttaaagtttcacttgaactttcaaataatgttcttatatgtgcagtgtcgaaagaaacaaagtaggactgatcccccattctattaaattttagaataatg

SEQ ID NO: 40 - DNA, 156 bp, Artificial sequence
  Synthetic sequence
caattgggctaccttttttttgttttgtttgcaatggttaatctattgttaaaatttaaagtttcacttgaactttcaaataatgttcttatatgtgcagtgtcgaaagaaacaaagtaggactgatcggtgttagctttaaatattagaataatg

SEQ ID NO: 41 - DNA, 156 bp, Artificial sequence
  Synthetic sequence
caattgggctaccttttttttgttttgtttgcaatggttaatctattgttaaaatttaaagtttcacttgaactttcaaataatgttcttatatgtgcagtgtcgaaagaaacaaagtaggactgatctagcactcttaaaaaaattaaaataatg

SEQ ID NO: 42 - DNA, 156 bp, Artificial sequence
  Synthetic sequence
caattgggctaccttttttttgttttgtttgcaatggttaatctattgttaaaatttaaagtttcacttgaactttcaaataatgttcttatatgtgcagtgtcgaaagaaacaaagtaggactgatcgtaatctttaaaaaaaataaaaataatg

SEQ ID NO: 43 - DNA, 156 bp, Artificial sequence
  Synthetic sequence
caattgggctaccttttttttgttttgtttgcaatggttaatctattgttaaaatttaaagtttcacttgaactttcaaataatgttcttatatgtgcagtgtcgaaagaaacaaagtaggactgatcgtccatcaatttaaaatttaaaataatg

SEQ ID NO: 44 - DNA, 156 bp, Artificial sequence
  Synthetic sequence
caattgggctaccttttttttgttttgtttgcaatggttaatctattgttaacatttaaagtttcacttgaactttcaaataatgttcttatattttcagtgtcgaaagaaacaaagtaggactgatcggcgcgactcacgcgccgatcagtaatg

SEQ ID NO: 45 - DNA, 156 bp, Artificial sequence
  Synthetic sequence
caattgggctaccttttttttgttttgtttgcaatggttaatctattgttaacatttaaagtttcacttgaactttcaaataatgttcttatattttcagtgtcgaaagaaacaaagtaggactgatcgggaggagtaaaaaatattaaaataatg

SEQ ID NO: 46 - DNA, 156 bp, Artificial sequence
  Synthetic sequence
caattgggctaccttttttttgttttgtttgcaatggttaatctattgttaacatttaaagtttcacttgaactttcaaataatgttcttatattttcagtgtcgaaagaaacaaagtaggactgatctctggggtgaataaaatttataataatg

SEQ ID NO: 47 - DNA, 156 bp, Artificial sequence
  Synthetic sequence
caattgggctaccttttttttgttttgtttgcaatggttaatctattgttaacatttaaagtttcacttgaactttcaaataatgttcttatattttcagtgtcgaaagaaacaaagtaggactgatcccccattctattaaattttagaataatg

SEQ ID NO: 48 - DNA, 156 bp, Artificial sequence
  Synthetic sequence
caattgggctaccttttttttgttttgtttgcaatggttaatctattgttaacatttaaagtttcacttgaactttcaaataatgttcttatattttcagtgtcgaaagaaacaaagtaggactgatcggtgttagctttaaatattagaataatg

SEQ ID NO: 49 - DNA, 156 bp, Artificial sequence
  Synthetic sequence
caattgggctaccttttttttgttttgtttgcaatggttaatctattgttaacatttaaagtttcacttgaactttcaaataatgttcttatattttcagtgtcgaaagaaacaaagtaggactgatctagcactcttaaaaaaattaaaataatg

SEQ ID NO: 50 - DNA, 156 bp, Artificial sequence
  Synthetic sequence
caattgggctaccttttttttgttttgtttgcaatggttaatctattgttaacatttaaagtttcacttgaactttcaaataatgttcttatattttcagtgtcgaaagaaacaaagtaggactgatcgtaatctttaaaaaaaataaaaataatg

SEQ ID NO: 51 - DNA, 156 bp, Artificial sequence
  Synthetic sequence
caattgggctaccttttttttgttttgtttgcaatggttaatctattgttaacatttaaagtttcacttgaactttcaaataatgttcttatattttcagtgtcgaaagaaacaaagtaggactgatcgtccatcaatttaaaatttaaaataatg

SEQ ID NO: 52 - DNA, 156 bp, Artificial sequence
  Synthetic sequence
caattgggctaccttttttttgttttgtttgcaatggttaatctattgttaaaatttaaagtttcacttgaactttcaaataatgttcttctatttgcagtgtcgaaagaaacaaagtaggactgatcggcgcgactcacgcgccgatcagtaatg

SEQ ID NO: 53 - DNA, 156 bp, Artificial sequence
  Synthetic sequence
caattgggctaccttttttttgttttgtttgcaatggttaatctattgttaaaatttaaagtttcacttgaactttcaaataatgttcttctatttgcagtgtcgaaagaaacaaagtaggactgatcgggaggagtaaaaaatattaaaataatg

SEQ ID NO: 54 - DNA, 156 bp, Artificial sequence
  Synthetic sequence
caattgggctaccttttttttgttttgtttgcaatggttaatctattgttaaaatttaaagtttcacttgaactttcaaataatgttcttctatttgcagtgtcgaaagaaacaaagtaggactgatctctggggtgaataaaatttataataatg

SEQ ID NO: 55 - DNA, 156 bp, Artificial sequence
  Synthetic sequence
caattgggctaccttttttttgttttgtttgcaatggttaatctattgttaaaatttaaagtttcacttgaactttcaaataatgttcttctatttgcagtgtcgaaagaaacaaagtaggactgatcccccattctattaaattttagaataatg

SEQ ID NO: 56 - DNA, 156 bp, Artificial sequence
  Synthetic sequence
caattgggctaccttttttttgttttgtttgcaatggttaatctattgttaaaatttaaagtttcacttgaactttcaaataatgttcttctatttgcagtgtcgaaagaaacaaagtaggactgatcggtgttagctttaaatattagaataatg

SEQ ID NO: 57 - DNA, 156 bp, Artificial sequence
  Synthetic sequence
caattgggctaccttttttttgttttgtttgcaatggttaatctattgttaaaatttaaagtttcacttgaactttcaaataatgttcttctatttgcagtgtcgaaagaaacaaagtaggactgatctagcactcttaaaaaaattaaaataatg

SEQ ID NO: 58 - DNA, 156 bp, Artificial sequence
  Synthetic sequence
caattgggctaccttttttttgttttgtttgcaatggttaatctattgttaaaatttaaagtttcacttgaactttcaaataatgttcttctatttgcagtgtcgaaagaaacaaagtaggactgatcgtaatctttaaaaaaaataaaaataatg

SEQ ID NO: 59 - DNA, 156 bp, Artificial sequence
  Synthetic sequence
caattgggctaccttttttttgttttgtttgcaatggttaatctattgttaaaatttaaagtttcacttgaactttcaaataatgttcttctatttgcagtgtcgaaagaaacaaagtaggactgatcgtccatcaatttaaaatttaaaataatg

SEQ ID NO: 60 - DNA, 156 bp, Artificial sequence
  Synthetic sequence
caattgggctaccttttttttgttttgtttgcaatggttaatctattgttaaaatttaaagtttcacttgaactttcaaataatgttcttatatttccagtgtcgaaagaaacaaagtaggactgatcggcgcgactcacgcgccgatcagtaatg

SEQ ID NO: 61 - DNA, 156 bp, Artificial sequence
  Synthetic sequence
caattgggctaccttttttttgttttgtttgcaatggttaatctattgttaaaatttaaagtttcacttgaactttcaaataatgttcttatatttccagtgtcgaaagaaacaaagtaggactgatcgggaggagtaaaaaatattaaaataatg

SEQ ID NO: 62 - DNA, 156 bp, Artificial sequence
  Synthetic sequence
caattgggctaccttttttttgttttgtttgcaatggttaatctattgttaaaatttaaagtttcacttgaactttcaaataatgttcttatatttccagtgtcgaaagaaacaaagtaggactgatctctggggtgaataaaatttataataatg

SEQ ID NO: 63 - DNA, 156 bp, Artificial sequence
  Synthetic sequence
caattgggctaccttttttttgttttgtttgcaatggttaatctattgttaaaatttaaagtttcacttgaactttcaaataatgttcttatatttccagtgtcgaaagaaacaaagtaggactgatcccccattctattaaattttagaataatg

SEQ ID NO: 64 - DNA, 156 bp, Artificial sequence
  Synthetic sequence
caattgggctaccttttttttgttttgtttgcaatggttaatctattgttaaaatttaaagtttcacttgaactttcaaataatgttcttatatttccagtgtcgaaagaaacaaagtaggactgatcggtgttagctttaaatattagaataatg

SEQ ID NO: 65 - DNA, 156 bp, Artificial sequence
  Synthetic sequence
caattgggctaccttttttttgttttgtttgcaatggttaatctattgttaaaatttaaagtttcacttgaactttcaaataatgttcttatatttccagtgtcgaaagaaacaaagtaggactgatctagcactcttaaaaaaattaaaataatg

SEQ ID NO: 66 - DNA, 156 bp, Artificial sequence
  Synthetic sequence
caattgggctaccttttttttgttttgtttgcaatggttaatctattgttaaaatttaaagtttcacttgaactttcaaataatgttcttatatttccagtgtcgaaagaaacaaagtaggactgatcgtaatctttaaaaaaaataaaaataatg

SEQ ID NO: 67 - DNA, 156 bp, Artificial sequence
  Synthetic sequence
caattgggctaccttttttttgttttgtttgcaatggttaatctattgttaaaatttaaagtttcacttgaactttcaaataatgttcttatatttccagtgtcgaaagaaacaaagtaggactgatcgtccatcaatttaaaatttaaaataatg

SEQ ID NO: 68 - DNA, 156 bp, Artificial sequence
  Synthetic sequence
caattgggctaccttttttttgttttgtttgcaatggttaatctattgttgaaatttaaagtttcacttgaactttcaaataatgttcttatatttgcagtgtcgaaagaaacaaagtaggactgatcggcgcgactcacgcgccgatcagtaatg

SEQ ID NO: 69 - DNA, 156 bp, Artificial sequence
  Synthetic sequence
caattgggctaccttttttttgttttgtttgcaatggttaatctattgttgaaatttaaagtttcacttgaactttcaaataatgttcttatatttgcagtgtcgaaagaaacaaagtaggactgatcgggaggagtaaaaaatattaaaataatg

SEQ ID NO: 70 - DNA, 156 bp, Artificial sequence
  Synthetic sequence
caattgggctaccttttttttgttttgtttgcaatggttaatctattgttgaaatttaaagtttcacttgaactttcaaataatgttcttatatttgcagtgtcgaaagaaacaaagtaggactgatctctggggtgaataaaatttataataatg

SEQ ID NO: 71 - DNA, 156 bp, Artificial sequence
  Synthetic sequence
caattgggctaccttttttttgttttgtttgcaatggttaatctattgttgaaatttaaagtttcacttgaactttcaaataatgttcttatatttgcagtgtcgaaagaaacaaagtaggactgatcccccattctattaaattttagaataatg

SEQ ID NO: 72 - DNA, 156 bp, Artificial sequence
  Synthetic sequence
caattgggctaccttttttttgttttgtttgcaatggttaatctattgttgaaatttaaagtttcacttgaactttcaaataatgttcttatatttgcagtgtcgaaagaaacaaagtaggactgatcggtgttagctttaaatattagaataatg

SEQ ID NO: 73 - DNA, 156 bp, Artificial sequence
  Synthetic sequence
caattgggctaccttttttttgttttgtttgcaatggttaatctattgttgaaatttaaagtttcacttgaactttcaaataatgttcttatatttgcagtgtcgaaagaaacaaagtaggactgatctagcactcttaaaaaaattaaaataatg

SEQ ID NO: 74 - DNA, 156 bp, Artificial sequence
  Synthetic sequence
caattgggctaccttttttttgttttgtttgcaatggttaatctattgttgaaatttaaagtttcacttgaactttcaaataatgttcttatatttgcagtgtcgaaagaaacaaagtaggactgatcgtaatctttaaaaaaaataaaaataatg

SEQ ID NO: 75 - DNA, 156 bp, Artificial sequence
  Synthetic sequence
caattgggctaccttttttttgttttgtttgcaatggttaatctattgttgaaatttaaagtttcacttgaactttcaaataatgttcttatatttgcagtgtcgaaagaaacaaagtaggactgatcgtccatcaatttaaaatttaaaataatg

SEQ ID NO: 76 - DNA, 156 bp, Artificial sequence
  Synthetic sequence
caattgggctaccttttttttgttttgtttgcaatggttaatctattgttaaaatttaaagtttcacttgaactttcaaataatgttcttatatttgcagtgtcgaaagaaacaaagtaggactgatcggcgcgactcacgcgccgatcagtaatg

SEQ ID NO: 77 - DNA, 156 bp, Artificial sequence
  Synthetic sequence
caattgggctaccttttttttgttttgtttgcaatggttaatctattgttaaaatttaaagtttcacttgaactttcaaataatgttcttatatttgcagtgtcgaaagaaacaaagtaggactgatcgggaggagtaaaaaatattaaaataatg

SEQ ID NO: 78 - DNA, 156 bp, Artificial sequence
  Synthetic sequence
caattgggctaccttttttttgttttgtttgcaatggttaatctattgttaaaatttaaagtttcacttgaactttcaaataatgttcttatatttgcagtgtcgaaagaaacaaagtaggactgatctctggggtgaataaaatttataataatg

SEQ ID NO: 79 - DNA, 156 bp, Artificial sequence
  Synthetic sequence
caattgggctaccttttttttgttttgtttgcaatggttaatctattgttaaaatttaaagtttcacttgaactttcaaataatgttcttatatttgcagtgtcgaaagaaacaaagtaggactgatcccccattctattaaattttagaataatg

SEQ ID NO: 80 - DNA, 156 bp, Artificial sequence
  Synthetic sequence
caattgggctaccttttttttgttttgtttgcaatggttaatctattgttaaaatttaaagtttcacttgaactttcaaataatgttcttatatttgcagtgtcgaaagaaacaaagtaggactgatcggtgttagctttaaatattagaataatg

SEQ ID NO: 81 - DNA, 156 bp, Artificial sequence
  Synthetic sequence
caattgggctaccttttttttgttttgtttgcaatggttaatctattgttaaaatttaaagtttcacttgaactttcaaataatgttcttatatttgcagtgtcgaaagaaacaaagtaggactgatctagcactcttaaaaaaattaaaataatg

SEQ ID NO: 82 - DNA, 156 bp, Artificial sequence
  Synthetic sequence
caattgggctaccttttttttgttttgtttgcaatggttaatctattgttaaaatttaaagtttcacttgaactttcaaataatgttcttatatttgcagtgtcgaaagaaacaaagtaggactgatcgtaatctttaaaaaaaataaaaataatg

SEQ ID NO: 83 - DNA, 156 bp, Artificial sequence
  Synthetic sequence
caattgggctaccttttttttgttttgtttgcaatggttaatctattgttaaaatttaaagtttcacttgaactttcaaataatgttcttatatttgcagtgtcgaaagaaacaaagtaggactgatcgtccatcaatttaaaatttaaaataatg

SEQ ID NO: 84 - DNA, 714 bp, Artificial sequence
  Synthetic sequence
atgcgtaaaggcgaagagctgttcactggtgtcgtccctattctggtggaactggatggtgatgtcaacggtcataagttttccgtgcgtggcgagggtgaaggtgacgcaactaatggtaaactgacgctgaagttcatctgtactactggtaaactgccggttccttggccgactctggtaacgacgctgacttatggtgttcagtgctttgctcgttatccggaccatatgaagcagcatgacttcttcaagtccgccatgccggaaggctatgtgcaggaacgcacgatttcctttaaggatgacggcacgtacaaaacgcgtgcggaagtgaaatttgaaggcgataccctggtaaaccgcattgagctgaaaggcattgactttaaagaagacggcaatatcctgggccataagctggaatacaattttaacagccacaatgtttacatcaccgccgataaacaaaaaaatggcattaaagcgaattttaaaattcgccacaacgtggaggatggcagcgtgcagctggctgatcactaccagcaaaacactccaatcggtgatggtcctgttctgctgccagacaatcactatctgagcacgcaaagcgttctgtctaaagatccgaacgagaaacgcgatcatatggttctgctggagttcgtaaccgcagcgggcatcacgcatggtatggatgaactgtacaaa

SEQ ID NO: 85 - DNA, 708 bp, Artificial sequence
  Synthetic sequence
atggtttcgaaaggggaagaagataacatggctatcattaaggagtttatgcgcttcaaggtgcacatggagggctctgtcaacggccacgagttcgaaatcgaaggtgaaggtgaaggtcgtccgtacgaaggtactcagaccgcaaagttgaaagttacaaaaggaggtccgttgcctttcgcttgggacattctgagcccgcaatttatgtacgggagcaaagcctatgttaaacatccggcggatattcccgattacctgaaactgtcattcccggaggggttcaagtgggaacgcgtcatgaactttgaagacggtggcgtggttacagtgactcaggattcgtcccttcaagatggcgaatttatctacaaagtcaaactgcgcgggacaaattttccgagtgacggtcctgttatgcagaagaagaccatggggtgggaagcaagctccgaacgcatgtaccccgaggacggtgcactcaaaggagaaatcaagcagcgtctgaaactgaaagatggcgggcactacgatgcagaagtgaaaaccacctataaggcgaaaaagcctgtacaactgccgggtgcctataatgtgaacattaaactggatataacgagtcacaacgaagactatacaatcgtcgagcagtatgagcgtgcggaaggacgtcattccactggtggaatggatgaactgtataag

SEQ ID NO: 86 - DNA, 513 bp, Artificial sequence
  Synthetic sequence
atggtttttactctggaagattttgttggcgattggcgtcagaccgcgggttataatttggatcaagtcctggaacagggtggcgtaagctctctgttccagaacctgggtgtgagcgtgacgccgattcagcgcatcgttctgtccggcgagaacggtctgaaaattgatattcatgtgatcatcccgtacgaaggcctgagcggtgaccaaatgggtcaaatcgagaaaatctttaaagtcgtctacccagttgacgatcaccacttcaaggttatcttgcattacggtacgctggtgattgatggtgtgaccccgaatatgattgactatttcggccgtccgtatgaaggcattgccgtttttgacggtaaaaagatcaccgtcaccggtaccctgtggaatggcaataagattattgacgagcgtctgattaacccggacggcagcctgctgttccgcgtgaccatcaacggtgtcacgggttggcgtctgtgcgagcgcatcctggca

SEQ ID NO: 87 - DNA, 30 bp, Artificial sequence
  Synthetic sequence
aaggccatcctgacggatggcctttttttt

SEQ ID NO: 88 - DNA, 862 bp, Artificial sequence
  Synthetic sequence
gttaccaatgcttaatcagtgaggcacctatctcagcgatctgtctatttcgttcatccatagttgcctgactccccgtcgtgtagataactacgatacgggagggcttaccatctggccccagtgctgcaatgataccgcgggacccacgctcaccggctccagatttatcagcaataaaccagccagccggaagggccgagcgcagaagtggtcctgcaactttatccgcctccatccagtctattaattgttgccgggaagctagagtaagtagttcgccagttaatagtttgcgcaacgttgttgccattgctacaggcatcgtggtgtcacgctcgtcgtttggtatggcttcattcagctccggttcccaacgatcaaggcgagttacatgatcccccatgttgtgcaaaaaagcggttagctccttcggtcctccgatcgttgtcagaagtaagttggccgcagtgttatcactcatggttatggcagcactgcataattctcttactgtcatgccatccgtaagatgcttttctgtgactggtgagtactcaaccaagtcattctgagaatagtgtatgcggcgaccgagttgctcttgcccggcgtcaatacgggataataccgcgccacatagcagaactttaaaagtgctcatcattggaaaacgttcttcggggcgaaaactctcaaggatcttaccgctgttgagatccagttcgatgtaacccactcgtgcacccaactgatcttcagcatcttttactttcaccagcgtttctgggtgagcaaaaacaggaaggcaaaatgccgcaaaaaagggaataagggcgacacggaaatgttgaatactcat

SEQ ID NO: 89 - DNA, 268 bp, Artificial sequence
  Synthetic sequence
cgagttgctcttgcccggcgtcaatacgggataataccgcgccacatagcagaactttaaaagtgctcatcattggaaaacgttcttcggggcgaaaactctcaaggatcttaccgctgttgagatccagttcgatgtaacccactcgtgcacccaactgatcttcagcatcttttactttcaccagcgtttctgggtgagcaaaaacaggaaggcaaaatgccgcaaaaaagggaataagggcgacacggaaatgttgaatactcat

SEQ ID NO: 90 - DNA, 598 bp, Artificial sequence
  Synthetic sequence
gttaccaatgcttaatcagtgaggcacctatctcagcgatctgtctatttcgttcatccatagttgcctgactccccgtcgtgtagataactacgatacgggagggcttaccatctggccccagtgctgcaatgataccgcgggacccacgctcaccggctccagatttatcagcaataaaccagccagccggaagggccgagcgcagaagtggtcctgcaactttatccgcctccatccagtctattaattgttgccgggaagctagagtaagtagttcgccagttaatagtttgcgcaacgttgttgccattgctacaggcatcgtggtgtcacgctcgtcgtttggtatggcttcattcagctccggttcccaacgatcaaggcgagttacatgatcccccatgttgtgcaaaaaagcggttagctccttcggtcctccgatcgttgtcagaagtaagttggccgcagtgttatcactcatggttatggcagcactgcataattctcttactgtcatgccatccgtaagatgcttttctgtgactggtgagtactcaaccaagtcattctgagaatagtgtatgcggcgaccgag

SEQ ID NO: 91 - DNA, 735 bp, Artificial sequence
  Synthetic sequence
atgaacaaagtaaatataaaagatagtcaaaattttattacttcaaaatatcacatagaaaaaataatgaattgcataagtttagatgaaaaagataacatctttgaaataggtgcagggaaaggtcattttactgctggattggtaaagagatgtaattttgtaacggcgatagaaattgattctaaattatgtgaggtaactcgtaataagctcttaaattatcctaactatcaaatagtaaatgatgatatactgaaatttacatttcctagccacaatccatataaaatatttggcagcataccttacaacataagcacaaatataattcgaaaaattgtttttgaaagttcagccacaataagttatttaatagtggaatatggttttgctaaaatgttattagatacaaacagatcactagcattgctgttaatggcagaggtagatatttctatattagcaaaaattcctaggtattatttccatccaaaacctaaagtggatagcacattaattgtattaaaaagaaagccagcaaaaatggcatttaaagagagaaaaaaatatgaaacttttgtaatgaaatgggttaacaaagagtacgaaaaactgtttacaaaaaatcaatttaataaagctttaaaacatgcgagaatatatgatataaacaatattagtttcgaacaatttgtatcgctatttaatagttataaaatatttaacggctaa

SEQ ID NO: 92 - DNA, 1926 bp, Artificial sequence
  Synthetic sequence
ttattttgatgacattgatttttggaacatgaataaaagtttatctttttcgttcatgcggatattatcagaataaccgccttttgttatttgatacccgcatggcttaaccataaaaatgcctaagcccttagtgtatgaacttacttctgatgcatagtctttacttgtatttaatggaactttccctttaatatgacaccactcattattgcaactgatgtcttcaatctcagacatcattttttgcaaatctgtaatagctttggaacttgccgcttggggtatctgcaactcaaaatagagcatcggttcgagaatgtccacacctgactgttgcaaggccagcctgaagacataaggggtcagctgtctgaaatcagcaggtgtacttaccgggctataatactcggcttgagtaaaagttactttcagatcagtcacttcccatccatgtaacccggattggcaagacatacgaatcccttcaaaaacggcattttgaaaagaatggttcagataaccataggagatgtcactttcgatttgcaaccctgtccctaacggtaagggttcaagagtcagccctattgtggcccaataagggttgggcggcacttcgatctgaataatcttattgaccttttttacaggtcgttctttgtatatagtcttgatctcatcaaaatggacctttacggaaaatcgttcttccagcaatgtctgtatgatttccttttgggttaaaccatataacgagatttccaattcatcactatatgagtttatggaaaaggacaaagacgggtcttcaatccacaatgtattcagagcggatatcaccttgcttctctcttcgggcctgtctggccggacggaggatttgagagcgggatgctgatgcgataatccttgaatcaaacaaggttcagcacctaaataatttccgattcgaaaatcatccatatcctctacaatcgcgatatcattggcgcccacttcatcaacatttatctctctgccctgattgatagtttttagatttttaatcttgatgaatttttccgaatcgttgattcttacaacgtctcgaagtctcagacttccgtcaattatttttagaaaacttcttttatgtcctttggggtcatgctctatcttataaagataagatgaaagtctgtttgaaaccgatgccggaggaagtataaaagaagtgatggcgtccaacaactcattgataccgatattgaacattgctgatccatgtagcaccggatagactttggcttttgccacaagagcgattatcgtattccaataatcagccggtgaaatttcgctatccgccaaatatcgttctaatatattgtcgtcatggttgcatacaaattctttgtattcttcctttatatatgtttgggagcaaaccggataaaccgatccatcgacaacattttgcataaacaggacatcttgagacagatttgcttttatatccagatacaaacgctccaaattcacaccggctcggtcaatcttattgataaatataattgtcgggatttgcagcttctgtaaagtattgaacagcaactttgtctgcgcttgtatgccttcctttgcggataagatgaggactgctccatcaagcattttgaatgtccgctccacttccgcaataaaatccatgtgtcccggagtgtcaatgatattgcatttcacaccattccagataatagatgtcgtagaagcccgaacagtaattcctctacgtttctctatatccatagagtccgttatggtgtcaccattatccacacagccgcacttttccgttgctccactggcaaacagcagattctcggttacggaagtttttcctgcatcaatgtgagcaagaattcctaaatttataatattcat

SEQ ID NO: 93 - DNA, 1281 bp, Artificial sequence
  Synthetic sequence
tagttgattaaacttgttcatggcatttgccttaatatcatccgctatgtcaatgtagggtttcatagctttgtagtcgctgtgtcccgtccatttcatgaccacctgtgccgggattccgagagccagcgcattgcagatgaatgtccttcttcctgcatgggtactgagcaaagcgtatttgggtgtgacttcatcaatacgttcatttcccttgtagtaggtttcccgtacaggctcgttgatttctgccagttcgcccagctctttcaggtaatcgttcatcttctggttgctgatgacgggcagagccatgtaattctcgaaatggatgtccttgtatttgtccagtatggctttgctgtatttgttcagttcaatcgtcaggctgtcggcagtcttgactgtggttatttcgatgtggtcggacttcacatcgcttcttttcagattgcgaacatccgaataccgcaaactcgtaaagcagcagaacaggaaaacatcacgcacacgttccaggtattgcttatccttgggtatctggtagtctttcagcttgttcagttcatcccaagtcaggaagattacttttttcgaggtggttttcagtttcggtttgaacgtatcgtatgcaatgttctgatgatgtcctttcttgaagctccagcgcaggaaccatttgaggaatcccatttgcttgccgatggtgctgtttctcatatccttggtgtcacgcaggaagttgacgtattcgttcaatccaaactcgttgaaatagttgaacgttgcatcctccttgaactctttgaggtggttcctcactgctgcaaatttttcataggtggatgccgtccagttattctggttaccgcactcttttacaaactcatcgaacacctcccaaaagctgacaggggcttcttccggctgttcttcgctggtgtctttcattctcatgttgaaagcttccttcaactgttgggtcgttggcatgacctcctgcacctcaaattccttgaaaatattctggatttcggcatagtatttcagcaagtccgtattgatttcggctgcactttgctttagcttgttggtacatccgctctttacccgctgcttatctgcatcccatttggctacgtcaatccggtagcccgttgtaaactcgatgcgttggctggcaaagatgacacgcatacggatgggtacgttctctacgattggcacaccgttctttttccggctctccaatgcaaaaatgatgttgcgcttgatattcat

SEQ ID NO: 94 - DNA, 2583 bp, Artificial sequence
  Synthetic sequence
gcggccgctccctatcagtgatagagattgacatccctatcagtgatagagatactgagcacggatctgaaagaggagaaaggatctatggcgagtagcgaagacgttatcaaagagttcatgcgtttcaaagttcgtatggaaggttccgttaacggtcacgagttcgaaatcgaaggtgaaggtgaaggtcgtccgtacgaaggtacccagaccgctaaactgaaagttaccaaaggtggtccgctgccgttcgcttgggacatcctgtccccgcagttccagtacggttccaaagcttacgttaaacacccggctgacatcccggactacctgaaactgtccttcccggaaggtttcaaatgggaacgtgttatgaacttcgaagacggtggtgttgttaccgttacccaggactcctccctgcaagacggtgagttcatctacaaagttaaactgcgtggtaccaacttcccgtccgacggtccggttatgcagaaaaaaaccatgggttgggaagcttccaccgaacgtatgtacccggaagacggtgctctgaaaggtgaaatcaaaatgcgtctgaaactgaaagacggtggtcactacgacgctgaagttaaaaccacctacatggctaaaaaaccggttcagctgccgggtgcttacaaaaccgacatcaaactggacatcacctcccacaacgaagactacaccatcgttgaacagtacgaacgtgctgaaggtcgtcactccaccggtgcttaataaggatctccaggcatcaaataaaacgaaaggctcagtcgaaagactgggcctttcgttttatctgttgtttgtcggtgaacgctctctactagagtcacactggctcaccttcgggtgggcctttctgcgtttatacctgcaggaaggccatcctgacggatggccttttttttagacggttatccacagaatcaggggataacgcaggaaagaacatgtgagcaaaaggccagcaaaaggccaggaaccgtaaaaaggccgcgttgctggcgtttttccataggctccgcccccctgacgagcatcacaaaaatcgacgctcaagtcagaggtggcgaaacccgacaggactataaagataccaggcgtttccccctggaagctccctcgtgcgctctcctgttccgaccctgccgcttaccggatacctgtccgcctttctcccttcgggaagcgtggcgctttctcatagctcacgctgtaggtatctcagttcggtgtaggtcgttcgctccaagctgggctgtgtgcacgaaccccccgttcagcccgaccgctgcgccttatccggtaactatcgtcttgagtccaacccggtaagacacgacttatcgccactggcagcagccactggtaacaggattagcagagcgaggtatgtaggcggtgctacagagttcttgaagtggtggcctaactacggctacactagaagaacagtatttggtatctgcgctctgctgaagccagttaccttcggaaaaagagttggtagctcttgatccggcaaacaaaccaccgctggtagcggtggtttttttgtttgcaagcagcagattacgcgcagaaaaaaaggatctcaagaagatcctttgatcttttctacggggtctgacgctcagtggaacgaaaactcacgttaagggattttggtcatgattgatcgggcacgtaagaggttccaactttcaccataatgaaataagatcactaccgggcgtattttttgagttatcgagattttcaggagctaaggaagctaaaatggagaaaaaaatcactggatataccaccgttgatatatcccaatggcatcgtaaagaacattttgaggcatttcagtcagttgctcaatgtacctataaccagaccgttcagctggatattacggcctttttaaagaccgtaaagaaaaataagcacaagttttatccggcctttattcacattcttgcccgcctgatgaatgctcatccggaatttcgtatggcaatgaaagacggtgagctggtgatatgggatagtgttcacccttgttacaccgttttccatgagcaaactgaaacgttttcatcgctctggagtgaataccacgacgatttccggcagtttctacacatatattcgcaagatgtggcgtgttacggtgaaaacctggcctatttccctaaagggtttattgagaatatgtttttcgtttcagccaatccctgggtgagtttcaccagttttgatttaaacgtggccaatatggacaacttcttcgcccccgttttcaccatgggcaaatattatacgcaaggcgacaaggtgctgatgccgctggcgattcaggttcatcatgccgtttgtgatggcttccatgtcggcagaatgcttaatgaattacaacagtactgcgatgagtggcagggcggggcgtaatttgatatcgagctcgcttggactcctgttgatagatccagtaatgacctcagaactccatctggatttgttcagaacgctcggttgccgccgggcgttttttattggtag

SEQ ID NO: 95 - DNA, 5823 bp, Artificial sequence
  Synthetic sequence
gcggccgctggtctcccgagttgctcttgcccggcgtcaatacgggataataccgcgccacatagcagaactttaaaagtgctcatcattggaaaacgttcttcggggcgaaaactctcaaggatcttaccgctgttgagatccagttcgatgtaacccactcgtgcacccaactgatcttcagcatcttttactttcaccagcgtttctgggtgagcaaaaacaggaaggcaaaatgccgcaaaaaagggaataagggcgacacggaaatgttgaatactcatactcttcctttttcaatattattgaagcatttatcagggttattgtctcatgagcggatacatatttgaatgtatttagaaaaataaacaaataggggttccgcgcacatttccccgaaaagtgccacctgctaagaaaccattattatcatgacattaacctataaaaataggcgtatcacgaggccctttcgtctcgcgcgtttcggtgatgacggtgaaaacctctgacacatgcagctcccggagacggtcacagcttgtctgtaagcggatgccgggagcagacaagcccgtcagggcgcgtcagcgggtgttggcgggtgtcggggctggcttaactatgcggcatcagagcagattgtactgagagtgcaccatacgtctatttttttattgccaagttctaatgcttctatctcctgccattcatagaggctattatatgccatacatccgataagaatggagataagtatatatcccaactgtattgccttatagaaatttcctgaccgctccattattttgatgacattgatttttggaacatgaataaaagtttatctttttcgttcatgcggatattatcagaataaccgccttttgttatttgatacccgcatggcttaaccataaaaatgcctaagcccttagtgtatgaacttacttctgatgcatagtctttacttgtatttaatggaactttccctttaatatgacaccactcattattgcaactgatgtcttcaatctcagacatcattttttgcaaatctgtaatagctttggaacttgccgcttggggtatctgcaactcaaaatagagcatcggttcgagaatgtccacacctgactgttgcaaggccagcctgaagacataaggggtcagctgtctgaaatcagcaggtgtacttaccgggctataatactcggcttgagtaaaagttactttcagatcagtcacttcccatccatgtaacccggattggcaagacatacgaatcccttcaaaaacggcattttgaaaagaatggttcagataaccataggagatgtcactttcgatttgcaaccctgtccctaacggtaagggttcaagagtcagccctattgtggcccaataagggttgggcggcacttcgatctgaataatcttattgaccttttttacaggtcgttctttgtatatagtcttgatctcatcaaaatggacctttacggaaaatcgttcttccagcaatgtctgtatgatttccttttgggttaaaccatataacgagatttccaattcatcactatatgagtttatggaaaaggacaaagacgggtcttcaatccacaatgtattcagagcggatatcaccttgcttctctcttcgggcctgtctggccggacggaggatttgagagcgggatgctgatgcgataatccttgaatcaaacaaggttcagcacctaaataatttccgattcgaaaatcatccatatcctctacaatcgcgatatcattggcgcccacttcatcaacatttatctctctgccctgattgatagtttttagatttttaatcttgatgaatttttccgaatcgttgattcttacaacgtctcgaagtctcagacttccgtcaattatttttagaaaacttcttttatgtcctttggggtcatgctctatcttataaagataagatgaaagtctgtttgaaaccgatgccggaggaagtataaaagaagtgatggcgtccaacaactcattgataccgatattgaacattgctgatccatgtagcaccggatagactttggcttttgccacaagagcgattatcgtattccaataatcagccggtgaaatttcgctatccgccaaatatcgttctaatatattgtcgtcatggttgcatacaaattctttgtattcttcctttatatatgtttgggagcaaaccggataaaccgatccatcgacaacattttgcataaacaggacatcttgagacagatttgcttttatatccagatacaaacgctccaaattcacaccggctcggtcaatcttattgataaatataattgtcgggatttgcagcttctgtaaagtattgaacagcaactttgtctgcgcttgtatgccttcctttgcggataagatgaggactgctccatcaagcattttgaatgtccgctccacttccgcaataaaatccatgtgtcccggagtgtcaatgatattgcatttcacaccattccagataatagatgtcgtagaagcccgaacagtaattcctctacgtttctctatatccatagagtccgttatggtgtcaccattatccacacagccgcacttttccgttgctccactggcaaacagcagattctcggttacggaagtttttcctgcatcaatgtgagcaagaattcctaaatttataatattcatttggattaagcaataatatactacaatagatgcattgtcgaaacgcaccttttaatacctcctcgtagcatatgagaactacaggattcctaactcgtattaatatgtatattattactgccgcataacgattacaaaattacacaaaaaaatatatctaacaaaagtaggaggattttttaactttttaccatagacattttattagggaaacgtaggttcaactggtaagtacaaataagtagaaatgtttgaacaacactgttttaggaagttgaaaaatcaagtttctctctcggtatagcgtttattttggccaatatcttctttagtttggcatttgagtatttcccattcgtgttctatttagctccttattatgagtatgtagcaagttgcttatcaaattcagcctctttgagggtcaaatatggttttgcaaatggtgactgacaagacataaacaaggtcagcaggattttttacataaatggacatgaatgtatataacggggtttgagggccaatggaacgaaaacgtacgttaaggagataacgcgtggtaccgacaccgcggtggaggggaattcccatgtcagccgttaagtgttcctgtgtcactcaaaattgctttgagaggctctaagggcttctcagtgcgttacatccctggcttgttgtccacaaccgttaaaccttaaaagctttaaaagccttatatattcttttttttcttataaaacttaaaaccttagaggctatttaagttgctgatttatattaattttattgttcaaacatgagagcttagtacgtgaaacatgagagcttagtacgttagccatgagagcttagtacgttagccatgagggtttagttcgttaaacatgagagcttagtacgttaaacatgagagcttagtacgtgaaacatgagagcttagtacgtactatcaacaggttgaactgctgatcttcagatcctctacgccggacgcatcgtggccggatcaattccgttttccgctgcataaccctgcttcggggtcattatagcgattttttcggtatatccatcctttttcgcacgatatacaggattttgccaaagggttcgtgtagactttccttggtgtatccaacggcgtcagccgggcaggataggtgaagtaggcccacccgcgagcgggtgttccttcttcactgtcccttattcgcacctggcggtgctcaacgggaatcctgctctgcgaggctggccggctaccgccggcgtaacagatgagggcaagcggatggctgatgaaaccaagccaaccaggaagggcagcccacctatcacggaattgatccccctcgaattggaattcgttccgtctcgattcagatctaaaggatccaatctatgagacctgcaggaaggccatcctgacggatggccttttttttagacggttatccacagaatcaggggataacgcaggaaagaacatgtgagcaaaaggccagcaaaaggccaggaaccgtaaaaaggccgcgttgctggcgtttttccataggctccgcccccctgacgagcatcacaaaaatcgacgctcaagtcagaggtggcgaaacccgacaggactataaagataccaggcgtttccccctggaagctccctcgtgcgctctcctgttccgaccctgccgcttaccggatacctgtccgcctttctcccttcgggaagcgtggcgctttctcatagctcacgctgtaggtatctcagttcggtgtaggtcgttcgctccaagctgggctgtgtgcacgaaccccccgttcagcccgaccgctgcgccttatccggtaactatcgtcttgagtccaacccggtaagacacgacttatcgccactggcagcagccactggtaacaggattagcagagcgaggtatgtaggcggtgctacagagttcttgaagtggtggcctaactacggctacactagaagaacagtatttggtatctgcgctctgctgaagccagttaccttcggaaaaagagttggtagctcttgatccggcaaacaaaccaccgctggtagcggtggtttttttgtttgcaagcagcagattacgcgcagaaaaaaaggatctcaagaagatcctttgatcttttctacggggtctgacgctcagtggaacgaaaactcacgttaagggattttggtcatgattgatcgggcacgtaagaggttccaactttcaccataatgaaataagatcactaccgggcgtattttttgagttatcgagattttcaggagctaaggaagctaaaatggagaaaaaaatcactggatataccaccgttgatatatcccaatggcatcgtaaagaacattttgaggcatttcagtcagttgctcaatgtacctataaccagaccgttcagctggatattacggcctttttaaagaccgtaaagaaaaataagcacaagttttatccggcctttattcacattcttgcccgcctgatgaatgctcatccggaatttcgtatggcaatgaaagacggtgagctggtgatatgggatagtgttcacccttgttacaccgttttccatgagcaaactgaaacgttttcatcgctctggagtgaataccacgacgatttccggcagtttctacacatatattcgcaagatgtggcgtgttacggtgaaaacctggcctatttccctaaagggtttattgagaatatgtttttcgtttcagccaatccctgggtgagtttcaccagttttgatttaaacgtggccaatatggacaacttcttcgcccccgttttcaccatgggcaaatattatacgcaaggcgacaaggtgctgatgccgctggcgattcaggttcatcatgccgtttgtgatggcttccatgtcggcagaatgcttaatgaattacaacagtactgcgatgagtggcagggcggggcgtaatttgatatcgagctcgcttggactcctgttgatagatccagtaatgacctcagaactccatctggatttgttcagaacgctcggttgccgccgggcgttttttattggtag

SEQ ID NO: 96 - DNA, 4072 bp, Artificial sequence
  Synthetic sequence
gcggccgctggtctcccgagttgctcttgcccggcgtcaatacgggataataccgcgccacatagcagaactttaaaagtgctcatcattggaaaacgttcttcggggcgaaaactctcaaggatcttaccgctgttgagatccagttcgatgtaacccactcgtgcacccaactgatcttcagcatcttttactttcaccagcgtttctgggtgagcaaaaacaggaaggcaaaatgccgcaaaaaagggaataagggcgacacggaaatgttgaatactcatactcttcctttttcaatcatggccgcgggattaaaagtcggggattggtgaacaaaaaggtgtttctctctttaagagaaatatcgttttgctaaacagttgatattgaggtatcattttatcgtaaaagacatttttgctcaacaattgcttgacggaaatcaacaaattttagcattttgtaaaaaagtcgctatataatttggtgaattggagttattttcatatttttgcatcccgaagagtttctcttaaagagagaaacatcttttgcataccttttccgaccgaatttttatgtcgtaaagaggggctttgcagggggtggactcagaaagatgagaatagatgactattgtagttgaaacacatagaaagttgctgatatacagaccgatacgcatatcgggatgaaccatgagtacgttcttttctcaaaaaacataaatattcgaaaagagatgcaataaattaaggagaggttataatgaacaaagtaaatataaaagatagtcaaaattttattacttcaaaatatcacatagaaaaaataatgaattgcataagtttagatgaaaaagataacatctttgaaataggtgcagggaaaggtcattttactgctggattggtaaagagatgtaattttgtaacggcgatagaaattgattctaaattatgtgaggtaactcgtaataagctcttaaattatcctaactatcaaatagtaaatgatgatatactgaaatttacatttcctagccacaatccatataaaatatttggcagcataccttacaacataagcacaaatataattcgaaaaattgtttttgaaagttcagccacaataagttatttaatagtggaatatggttttgctaaaatgttattagatacaaacagatcactagcattgctgttaatggcagaggtagatatttctatattagcaaaaattcctaggtattatttccatccaaaacctaaagtggatagcacattaattgtattaaaaagaaagccagcaaaaatggcatttaaagagagaaaaaaatatgaaacttttgtaatgaaatgggttaacaaagagtacgaaaaactgtttacaaaaaatcaatttaataaagctttaaaacatgcgagaatatatgatataaacaatattagtttcgaacaatttgtatcgctatttaatagttataaaatatttaacggctaaaaacaataggccacatgcaactgtaaatgtttacgcgggtaccgacaccgcggtggaggggaattcccatgtcagccgttaagtgttcctgtgtcactcaaaattgctttgagaggctctaagggcttctcagtgcgttacatccctggcttgttgtccacaaccgttaaaccttaaaagctttaaaagccttatatattcttttttttcttataaaacttaaaaccttagaggctatttaagttgctgatttatattaattttattgttcaaacatgagagcttagtacgtgaaacatgagagcttagtacgttagccatgagagcttagtacgttagccatgagggtttagttcgttaaacatgagagcttagtacgttaaacatgagagcttagtacgtgaaacatgagagcttagtacgtactatcaacaggttgaactgctgatcttcagatcctctacgccggacgcatcgtggccggatcaattccgttttccgctgcataaccctgcttcggggtcattatagcgattttttcggtatatccatcctttttcgcacgatatacaggattttgccaaagggttcgtgtagactttccttggtgtatccaacggcgtcagccgggcaggataggtgaagtaggcccacccgcgagcgggtgttccttcttcactgtcccttattcgcacctggcggtgctcaacgggaatcctgctctgcgaggctggccggctaccgccggcgtaacagatgagggcaagcggatggctgatgaaaccaagccaaccaggaagggcagcccacctatcacggaattgatccccctcgaattggaattcgttccgtctcgattcagatctaaaggatccaatctatgagacctgcaggaaggccatcctgacggatggccttttttttagacggttatccacagaatcaggggataacgcaggaaagaacatgtgagcaaaaggccagcaaaaggccaggaaccgtaaaaaggccgcgttgctggcgtttttccataggctccgcccccctgacgagcatcacaaaaatcgacgctcaagtcagaggtggcgaaacccgacaggactataaagataccaggcgtttccccctggaagctccctcgtgcgctctcctgttccgaccctgccgcttaccggatacctgtccgcctttctcccttcgggaagcgtggcgctttctcatagctcacgctgtaggtatctcagttcggtgtaggtcgttcgctccaagctgggctgtgtgcacgaaccccccgttcagcccgaccgctgcgccttatccggtaactatcgtcttgagtccaacccggtaagacacgacttatcgccactggcagcagccactggtaacaggattagcagagcgaggtatgtaggcggtgctacagagttcttgaagtggtggcctaactacggctacactagaagaacagtatttggtatctgcgctctgctgaagccagttaccttcggaaaaagagttggtagctcttgatccggcaaacaaaccaccgctggtagcggtggtttttttgtttgcaagcagcagattacgcgcagaaaaaaaggatctcaagaagatcctttgatcttttctacggggtctgacgctcagtggaacgaaaactcacgttaagggattttggtcatgattgatcgggcacgtaagaggttccaactttcaccataatgaaataagatcactaccgggcgtattttttgagttatcgagattttcaggagctaaggaagctaaaatggagaaaaaaatcactggatataccaccgttgatatatcccaatggcatcgtaaagaacattttgaggcatttcagtcagttgctcaatgtacctataaccagaccgttcagctggatattacggcctttttaaagaccgtaaagaaaaataagcacaagttttatccggcctttattcacattcttgcccgcctgatgaatgctcatccggaatttcgtatggcaatgaaagacggtgagctggtgatatgggatagtgttcacccttgttacaccgttttccatgagcaaactgaaacgttttcatcgctctggagtgaataccacgacgatttccggcagtttctacacatatattcgcaagatgtggcgtgttacggtgaaaacctggcctatttccctaaagggtttattgagaatatgtttttcgtttcagccaatccctgggtgagtttcaccagttttgatttaaacgtggccaatatggacaacttcttcgcccccgttttcaccatgggcaaatattatacgcaaggcgacaaggtgctgatgccgctggcgattcaggttcatcatgccgtttgtgatggcttccatgtcggcagaatgcttaatgaattacaacagtactgcgatgagtggcagggcggggcgtaatttgatatcgagctcgcttggactcctgttgatagatccagtaatgacctcagaactccatctggatttgttcagaacgctcggttgccgccgggcgttttttattggtag

SEQ ID NO: 97 - DNA, 4243 bp, Artificial sequence
  Synthetic sequence
gcggccgctggtctcccgagttgctcttgcccggcgtcaatacgggataataccgcgccacatagcagaactttaaaagtgctcatcattggaaaacgttcttcggggcgaaaactctcaaggatcttaccgctgttgagatccagttcgatgtaacccactcgtgcacccaactgatcttcagcatcttttactttcaccagcgtttctgggtgagcaaaaacaggaaggcaaaatgccgcaaaaaagggaataagggcgacacggaaatgttgaatactcatactcttcctttttcaatcatggccgcgggattaaaagtcggggattggtgaacaaaaaggtgtttctctctttaagagaaatatcgttttgctaaacagttgatattgaggtatcattttatcgtaaaagacatttttgctcaacaattgcttgacggaaatcaacaaattttagcattttgtaaaaaagtcgctatataatttggtgaattggagttattttcatatttttgcatcccgaagagtttctcttaaagagagaaacatcttttgcataccttttccgaccgaatttttatgtcgtaaagaggggctttgcagggggtggactcagaaagatgagaatagatgactattgtagttgaaacacatagaaagttgctgatatacagaccgatacgcatatcgggatgaaccatgagtacgttcttttctcaaaaaacataaatattcgaaaagagatgcaataaattaaggagaggttataatgaacaaagtaaatataaaagatagtcaaaattttattacttcaaaatatcacatagaaaaaataatgaattgcataagtttagatgaaaaagataacatctttgaaataggtgcagggaaaggtcattttactgctggattggtaaagagatgtaattttgtaacggcgatagaaattgattctaaattatgtgaggtaactcgtaataagctcttaaattatcctaactatcaaatagtaaatgatgatatactgaaatttacatttcctagccacaatccatataaaatatttggcagcataccttacaacataagcacaaatataattcgaaaaattgtttttgaaagttcagccacaataagttatttaatagtggaatatggttttgctaaaatgttattagatacaaacagatcactagcattgctgttaatggcagaggtagatatttctatattagcaaaaattcctaggtattatttccatccaaaacctaaagtggatagcacattaattgtattaaaaagaaagccagcaaaaatggcatttaaagagagaaaaaaatatgaaacttttgtaatgaaatgggttaacaaagagtacgaaaaactgtttacaaaaaatcaatttaataaagctttaaaacatgcgagaatatatgatataaacaatattagtttcgaacaatttgtatcgctatttaatagttataaaatatttaacggctaaaaacaataggccacatgcaactgtaaatgtttacgcgggtaccgacaccgcggtggaggggaattcccatgtcagccgttaagtgttcctgtgtcactcaaaattgctttgagaggctctaagggcttctcagtgcgttacatccctggcttgttgtccacaaccgttaaaccttaaaagctttaaaagccttatatattcttttttttcttataaaacttaaaaccttagaggctatttaagttgctgatttatattaattttattgttcaaacatgagagcttagtacgtgaaacatgagagcttagtacgttagccatgagagcttagtacgttagccatgagggtttagttcgttaaacatgagagcttagtacgttaaacatgagagcttagtacgtgaaacatgagagcttagtacgtactatcaacaggttgaactgctgatcttcagatcctctacgccggacgcatcgtggccggatcaattccgttttccgctgcataaccctgcttcggggtcattatagcgattttttcggtatatccatcctttttcgcacgatatacaggattttgccaaagggttcgtgtagactttccttggtgtatccaacggcgtcagccgggcaggataggtgaagtaggcccacccgcgagcgggtgttccttcttcactgtcccttattcgcacctggcggtgctcaacgggaatcctgctctgcgaggctggccggctaccgccggcgtaacagatgagggcaagcggatggctgatgaaaccaagccaaccaggaagggcagcccacctatcacggaattgatccccctcgaattggaattcgttccgtctcgattcagatctaaaggatccaatctagataaaacgaaaggctcagtcgaaagactgggcctttcgttttacaattgggctaccttttttttgttttgtttgcaatggttaatctattgttaaaatttaaagtttcacttgaactttcaaataatgttcttatatttgcagtgtcgaaagaaacaaagtaggacttgagaccacctgcaggaaggccatcctgacggatggccttttttttagacggttatccacagaatcaggggataacgcaggaaagaacatgtgagcaaaaggccagcaaaaggccaggaaccgtaaaaaggccgcgttgctggcgtttttccataggctccgcccccctgacgagcatcacaaaaatcgacgctcaagtcagaggtggcgaaacccgacaggactataaagataccaggcgtttccccctggaagctccctcgtgcgctctcctgttccgaccctgccgcttaccggatacctgtccgcctttctcccttcgggaagcgtggcgctttctcatagctcacgctgtaggtatctcagttcggtgtaggtcgttcgctccaagctgggctgtgtgcacgaaccccccgttcagcccgaccgctgcgccttatccggtaactatcgtcttgagtccaacccggtaagacacgacttatcgccactggcagcagccactggtaacaggattagcagagcgaggtatgtaggcggtgctacagagttcttgaagtggtggcctaactacggctacactagaagaacagtatttggtatctgcgctctgctgaagccagttaccttcggaaaaagagttggtagctcttgatccggcaaacaaaccaccgctggtagcggtggtttttttgtttgcaagcagcagattacgcgcagaaaaaaaggatctcaagaagatcctttgatcttttctacggggtctgacgctcagtggaacgaaaactcacgttaagggattttggtcatgattgatcgggcacgtaagaggttccaactttcaccataatgaaataagatcactaccgggcgtattttttgagttatcgagattttcaggagctaaggaagctaaaatggagaaaaaaatcactggatataccaccgttgatatatcccaatggcatcgtaaagaacattttgaggcatttcagtcagttgctcaatgtacctataaccagaccgttcagctggatattacggcctttttaaagaccgtaaagaaaaataagcacaagttttatccggcctttattcacattcttgcccgcctgatgaatgctcatccggaatttcgtatggcaatgaaagacggtgagctggtgatatgggatagtgttcacccttgttacaccgttttccatgagcaaactgaaacgttttcatcgctctggagtgaataccacgacgatttccggcagtttctacacatatattcgcaagatgtggcgtgttacggtgaaaacctggcctatttccctaaagggtttattgagaatatgtttttcgtttcagccaatccctgggtgagtttcaccagttttgatttaaacgtggccaatatggacaacttcttcgcccccgttttcaccatgggcaaatattatacgcaaggcgacaaggtgctgatgccgctggcgattcaggttcatcatgccgtttgtgatggcttccatgtcggcagaatgcttaatgaattacaacagtactgcgatgagtggcagggcggggcgtaatttgatatcgagctcgcttggactcctgttgatagatccagtaatgacctcagaactccatctggatttgttcagaacgctcggttgccgccgggcgttttttattggtag

SEQ ID NO: 98 - DNA, 2495 bp, Artificial sequence
  Synthetic sequence
gcggccgctggtctccaatgcgtaaaggcgaagagctgttcactggtgtcgtccctattctggtggaactggatggtgatgtcaacggtcataagttttccgtgcgtggcgagggtgaaggtgacgcaactaatggtaaactgacgctgaagttcatctgtactactggtaaactgccggttccttggccgactctggtaacgacgctgacttatggtgttcagtgctttgctcgttatccggaccatatgaagcagcatgacttcttcaagtccgccatgccggaaggctatgtgcaggaacgcacgatttcctttaaggatgacggcacgtacaaaacgcgtgcggaagtgaaatttgaaggcgataccctggtaaaccgcattgagctgaaaggcattgactttaaagaagacggcaatatcctgggccataagctggaatacaattttaacagccacaatgtttacatcaccgccgataaacaaaaaaatggcattaaagcgaattttaaaattcgccacaacgtggaggatggcagcgtgcagctggctgatcactaccagcaaaacactccaatcggtgatggtcctgttctgctgccagacaatcactatctgagcacgcaaagcgttctgtctaaagatccgaacgagaaacgcgatcatatggttctgctggagttcgtaaccgcagcgggcatcacgcatggtatggatgaactgtacaaaggatctgattacaaggacgatgatgataaggactacaaagatgatgatgacaaagattataaggacgatgatgataaaggtcatcatcatcatcatcactaaatcctgagaccacctgcaggagacggttatccacagaatcaggggataacgcaggaaagaacatgtgagcaaaaggccagcaaaaggccaggaaccgtaaaaaggccgcgttgctggcgtttttccataggctccgcccccctgacgagcatcacaaaaatcgacgctcaagtcagaggtggcgaaacccgacaggactataaagataccaggcgtttccccctggaagctccctcgtgcgctctcctgttccgaccctgccgcttaccggatacctgtccgcctttctcccttcgggaagcgtggcgctttctcatagctcacgctgtaggtatctcagttcggtgtaggtcgttcgctccaagctgggctgtgtgcacgaaccccccgttcagcccgaccgctgcgccttatccggtaactatcgtcttgagtccaacccggtaagacacgacttatcgccactggcagcagccactggtaacaggattagcagagcgaggtatgtaggcggtgctacagagttcttgaagtggtggcctaactacggctacactagaagaacagtatttggtatctgcgctctgctgaagccagttaccttcggaaaaagagttggtagctcttgatccggcaaacaaaccaccgctggtagcggtggtttttttgtttgcaagcagcagattacgcgcagaaaaaaaggatctcaagaagatcctttgatcttttctacggggtctgacgctcagtggaacgaaaactcacgttaagggattttggtcatgattgatcgggcacgtaagaggttccaactttcaccataatgaaataagatcactaccgggcgtattttttgagttatcgagattttcaggagctaaggaagctaaaatggagaaaaaaatcactggatataccaccgttgatatatcccaatggcatcgtaaagaacattttgaggcatttcagtcagttgctcaatgtacctataaccagaccgttcagctggatattacggcctttttaaagaccgtaaagaaaaataagcacaagttttatccggcctttattcacattcttgcccgcctgatgaatgctcatccggaatttcgtatggcaatgaaagacggtgagctggtgatatgggatagtgttcacccttgttacaccgttttccatgagcaaactgaaacgttttcatcgctctggagtgaataccacgacgatttccggcagtttctacacatatattcgcaagatgtggcgtgttacggtgaaaacctggcctatttccctaaagggtttattgagaatatgtttttcgtttcagccaatccctgggtgagtttcaccagttttgatttaaacgtggccaatatggacaacttcttcgcccccgttttcaccatgggcaaatattatacgcaaggcgacaaggtgctgatgccgctggcgattcaggttcatcatgccgtttgtgatggcttccatgtcggcagaatgcttaatgaattacaacagtactgcgatgagtggcagggcggggcgtaatttgatatcgagctcgcttggactcctgttgatagatccagtaatgacctcagaactccatctggatttgttcagaacgctcggttgccgccgggcgttttttattggtag

SEQ ID NO: 99 - DNA, 2420 bp, Artificial sequence
  Synthetic sequence
gcggccgctggtctccaatggtttcgaaaggggaagaagataacatggctatcattaaggagtttatgcgcttcaaggtgcacatggagggctctgtcaacggccacgagttcgaaatcgaaggtgaaggtgaaggtcgtccgtacgaaggtactcagaccgcaaagttgaaagttacaaaaggaggtccgttgcctttcgcttgggacattctgagcccgcaatttatgtacgggagcaaagcctatgttaaacatccggcggatattcccgattacctgaaactgtcattcccggaggggttcaagtgggaacgcgtcatgaactttgaagacggtggcgtggttacagtgactcaggattcgtcccttcaagatggcgaatttatctacaaagtcaaactgcgcgggacaaattttccgagtgacggtcctgttatgcagaagaagaccatggggtgggaagcaagctccgaacgcatgtaccccgaggacggtgcactcaaaggagaaatcaagcagcgtctgaaactgaaagatggcgggcactacgatgcagaagtgaaaaccacctataaggcgaaaaagcctgtacaactgccgggtgcctataatgtgaacattaaactggatataacgagtcacaacgaagactatacaatcgtcgagcagtatgagcgtgcggaaggacgtcattccactggtggaatggatgaactgtataagtaaatcctgagaccacctgcaggaaggccatcctgacggatggccttttttttagacggttatccacagaatcaggggataacgcaggaaagaacatgtgagcaaaaggccagcaaaaggccaggaaccgtaaaaaggccgcgttgctggcgtttttccataggctccgcccccctgacgagcatcacaaaaatcgacgctcaagtcagaggtggcgaaacccgacaggactataaagataccaggcgtttccccctggaagctccctcgtgcgctctcctgttccgaccctgccgcttaccggatacctgtccgcctttctcccttcgggaagcgtggcgctttctcatagctcacgctgtaggtatctcagttcggtgtaggtcgttcgctccaagctgggctgtgtgcacgaaccccccgttcagcccgaccgctgcgccttatccggtaactatcgtcttgagtccaacccggtaagacacgacttatcgccactggcagcagccactggtaacaggattagcagagcgaggtatgtaggcggtgctacagagttcttgaagtggtggcctaactacggctacactagaagaacagtatttggtatctgcgctctgctgaagccagttaccttcggaaaaagagttggtagctcttgatccggcaaacaaaccaccgctggtagcggtggtttttttgtttgcaagcagcagattacgcgcagaaaaaaaggatctcaagaagatcctttgatcttttctacggggtctgacgctcagtggaacgaaaactcacgttaagggattttggtcatgattgatcgggcacgtaagaggttccaactttcaccataatgaaataagatcactaccgggcgtattttttgagttatcgagattttcaggagctaaggaagctaaaatggagaaaaaaatcactggatataccaccgttgatatatcccaatggcatcgtaaagaacattttgaggcatttcagtcagttgctcaatgtacctataaccagaccgttcagctggatattacggcctttttaaagaccgtaaagaaaaataagcacaagttttatccggcctttattcacattcttgcccgcctgatgaatgctcatccggaatttcgtatggcaatgaaagacggtgagctggtgatatgggatagtgttcacccttgttacaccgttttccatgagcaaactgaaacgttttcatcgctctggagtgaataccacgacgatttccggcagtttctacacatatattcgcaagatgtggcgtgttacggtgaaaacctggcctatttccctaaagggtttattgagaatatgtttttcgtttcagccaatccctgggtgagtttcaccagttttgatttaaacgtggccaatatggacaacttcttcgcccccgttttcaccatgggcaaatattatacgcaaggcgacaaggtgctgatgccgctggcgattcaggttcatcatgccgtttgtgatggcttccatgtcggcagaatgcttaatgaattacaacagtactgcgatgagtggcagggcggggcgtaatttgatatcgagctcgcttggactcctgttgatagatccagtaatgacctcagaactccatctggatttgttcagaacgctcggttgccgccgggcgttttttattggtag

SEQ ID NO: 100 - DNA, 2225 bp, Artificial sequence
  Synthetic sequence
gcggccgctggtctccaatggtttttactctggaagattttgttggcgattggcgtcagaccgcgggttataatttggatcaagtcctggaacagggtggcgtaagctctctgttccagaacctgggtgtgagcgtgacgccgattcagcgcatcgttctgtccggcgagaacggtctgaaaattgatattcatgtgatcatcccgtacgaaggcctgagcggtgaccaaatgggtcaaatcgagaaaatctttaaagtcgtctacccagttgacgatcaccacttcaaggttatcttgcattacggtacgctggtgattgatggtgtgaccccgaatatgattgactatttcggccgtccgtatgaaggcattgccgtttttgacggtaaaaagatcaccgtcaccggtaccctgtggaatggcaataagattattgacgagcgtctgattaacccggacggcagcctgctgttccgcgtgaccatcaacggtgtcacgggttggcgtctgtgcgagcgcatcctggcataaatcctgagaccacctgcaggaaggccatcctgacggatggccttttttttagacggttatccacagaatcaggggataacgcaggaaagaacatgtgagcaaaaggccagcaaaaggccaggaaccgtaaaaaggccgcgttgctggcgtttttccataggctccgcccccctgacgagcatcacaaaaatcgacgctcaagtcagaggtggcgaaacccgacaggactataaagataccaggcgtttccccctggaagctccctcgtgcgctctcctgttccgaccctgccgcttaccggatacctgtccgcctttctcccttcgggaagcgtggcgctttctcatagctcacgctgtaggtatctcagttcggtgtaggtcgttcgctccaagctgggctgtgtgcacgaaccccccgttcagcccgaccgctgcgccttatccggtaactatcgtcttgagtccaacccggtaagacacgacttatcgccactggcagcagccactggtaacaggattagcagagcgaggtatgtaggcggtgctacagagttcttgaagtggtggcctaactacggctacactagaagaacagtatttggtatctgcgctctgctgaagccagttaccttcggaaaaagagttggtagctcttgatccggcaaacaaaccaccgctggtagcggtggtttttttgtttgcaagcagcagattacgcgcagaaaaaaaggatctcaagaagatcctttgatcttttctacggggtctgacgctcagtggaacgaaaactcacgttaagggattttggtcatgattgatcgggcacgtaagaggttccaactttcaccataatgaaataagatcactaccgggcgtattttttgagttatcgagattttcaggagctaaggaagctaaaatggagaaaaaaatcactggatataccaccgttgatatatcccaatggcatcgtaaagaacattttgaggcatttcagtcagttgctcaatgtacctataaccagaccgttcagctggatattacggcctttttaaagaccgtaaagaaaaataagcacaagttttatccggcctttattcacattcttgcccgcctgatgaatgctcatccggaatttcgtatggcaatgaaagacggtgagctggtgatatgggatagtgttcacccttgttacaccgttttccatgagcaaactgaaacgttttcatcgctctggagtgaataccacgacgatttccggcagtttctacacatatattcgcaagatgtggcgtgttacggtgaaaacctggcctatttccctaaagggtttattgagaatatgtttttcgtttcagccaatccctgggtgagtttcaccagttttgatttaaacgtggccaatatggacaacttcttcgcccccgttttcaccatgggcaaatattatacgcaaggcgacaaggtgctgatgccgctggcgattcaggttcatcatgccgtttgtgatggcttccatgtcggcagaatgcttaatgaattacaacagtactgcgatgagtggcagggcggggcgtaatttgatatcgagctcgcttggactcctgttgatagatccagtaatgacctcagaactccatctggatttgttcagaacgctcggttgccgccgggcgttttttattggtag

SEQ ID NO: 101 - DNA, 4307 bp, Artificial sequence
  Synthetic sequence
ttgatcgggcacgtaagaggttccaactttcaccataatgaaataagatcactaccgggcgtattttttgagttatcgagattttcaggagctaaggaagctaaaatggagaaaaaaatcactggatataccaccgttgatatatcccaatggcatcgtaaagaacattttgaggcatttcagtcagttgctcaatgtacctataaccagaccgttcagctggatattacggcctttttaaagaccgtaaagaaaaataagcacaagttttatccggcctttattcacattcttgcccgcctgatgaatgctcatccggaatttcgtatggcaatgaaagacggtgagctggtgatatgggatagtgttcacccttgttacaccgttttccatgagcaaactgaaacgttttcatcgctctggagtgaataccacgacgatttccggcagtttctacacatatattcgcaagatgtggcgtgttacggtgaaaacctggcctatttccctaaagggtttattgagaatatgtttttcgtttcagccaatccctgggtgagtttcaccagttttgatttaaacgtggccaatatggacaacttcttcgcccccgttttcaccatgggcaaatattatacgcaaggcgacaaggtgctgatgccgctggcgattcaggttcatcatgccgtttgtgatggcttccatgtcggcagaatgcttaatgaattacaacagtactgcgatgagtggcagggcggggcgtaatttgatatcgagctcgcttggactcctgttgatagatccagtaatgacctcagaactccatctggatttgttcagaacgctcggttgccgccgggcgttttttattggtaggcggccgcggtctccatcctagctgattagctcgagaaggccatcctgacggatggccttttttttgtatcgagacgactagtgtaattgcctatcttccagtgatggaacagcatttgtgcattggctgcaacaatcagccttacttgtgcctgttctatttccgaaccgaccgcttgtatgaatgcatcaaaattcgttttctctacgttggattccttgttgctcatattgtgatgataatttctacaaatatagtcattggtaactatctatgaaactgtttgatacttttatagttgattaaacttgttcatggcatttgccttaatatcatccgctatgtcaatgtagggtttcatagctttgtagtcgctgtgtcccgtccatttcatgaccacctgtgccgggattccgagagccagcgcattgcagatgaatgtccttcttcctgcatgggtactgagcaaagcgtatttgggtgtgacttcatcaatacgttcatttcccttgtagtaggtttcccgtacaggctcgttgatttctgccagttcgcccagctctttcaggtaatcgttcatcttctggttgctgatgacgggcagagccatgtaattctcgaaatggatgtccttgtatttgtccagtatggctttgctgtatttgttcagttcaatcgtcaggctgtcggcagtcttgactgtggttatttcgatgtggtcggacttcacatcgcttcttttcagattgcgaacatccgaataccgcaaactcgtaaagcagcagaacaggaaaacatcacgcacacgttccaggtattgcttatccttgggtatctggtagtctttcagcttgttcagttcatcccaagtcaggaagattacttttttcgaggtggttttcagtttcggtttgaacgtatcgtatgcaatgttctgatgatgtcctttcttgaagctccagcgcaggaaccatttgaggaatcccatttgcttgccgatggtgctgtttctcatatccttggtgtcacgcaggaagttgacgtattcgttcaatccaaactcgttgaaatagttgaacgttgcatcctccttgaactctttgaggtggttcctcactgctgcaaatttttcataggtggatgccgtccagttattctggttaccgcactcttttacaaactcatcgaacacctcccaaaagctgacaggggcttcttccggctgttcttcgctggtgtctttcattctcatgttgaaagcttccttcaactgttgggtcgttggcatgacctcctgcacctcaaattccttgaaaatattctggatttcggcatagtatttcagcaagtccgtattgatttcggctgcactttgctttagcttgttggtacatccgctctttacccgctgcttatctgcatcccatttggctacgtcaatccggtagcccgttgtaaactcgatgcgttggctggcaaagatgacacgcatacggatgggtacgttctctacgattggcacaccgttctttttccggctctccaatgcaaaaatgatgttgcgcttgatattcataattgggtgcgtttgaaattctacacccaaatatacacccaattattgagatagcaaaagacatttagaaacatttacttttactctatattgtaatttacacttgattatcagtcgtttgcagtcttatgatattctgtgaaagtataagttcgagagcctgtctctccgcaaaaaacgctgaaaatcagcagattgcaaaacaaacaccctgttttacacccaagaatgtaaagtcggctgtttttgttttatttaagataatacaaccactacataataaaagagtagcgatattaaaagaatccgatgagaaaagactaatatttatctatccattcagtttgatttttcaggactttacatcgtcctgaaagtatttgttggtaccggtaccgaggacgcgacagctgcagacgcgttatgagtaaacttggtctgacagttaccaatgcttaatcagtgaggcacctatctcagcgatctgtctatttcgttcatccatagttgcctgactccccgtcgtgtagataactacgatacgggagggcttaccatctggccccagtgctgcaatgataccgcgggacccacgctcaccggctccagatttatcagcaataaaccagccagccggaagggccgagcgcagaagtggtcctgcaactttatccgcctccatccagtctattaattgttgccgggaagctagagtaagtagttcgccagttaatagtttgcgcaacgttgttgccattgctacaggcatcgtggtgtcacgctcgtcgtttggtatggcttcattcagctccggttcccaacgatcaaggcgagttacatgatcccccatgttgtgcaaaaaagcggttagctccttcggtcctccgatcgttgtcagaagtaagttggccgcagtgttatcactcatggttatggcagcactgcataattctcttactgtcatgccatccgtaagatgcttttctgtgactggtgagtactcaaccaagtcattctgagaatagtgtatgcggcgaccgagtgagaccacctgcaggaaggccatcctgacggatggccttttttttagacggttatccacagaatcaggggataacgcaggaaagaacatgtgagcaaaaggccagcaaaaggccaggaaccgtaaaaaggccgcgttgctggcgtttttccataggctccgcccccctgacgagcatcacaaaaatcgacgctcaagtcagaggtggcgaaacccgacaggactataaagataccaggcgtttccccctggaagctccctcgtgcgctctcctgttccgaccctgccgcttaccggatacctgtccgcctttctcccttcgggaagcgtggcgctttctcatagctcacgctgtaggtatctcagttcggtgtaggtcgttcgctccaagctgggctgtgtgcacgaaccccccgttcagcccgaccgctgcgccttatccggtaactatcgtcttgagtccaacccggtaagacacgacttatcgccactggcagcagccactggtaacaggattagcagagcgaggtatgtaggcggtgctacagagttcttgaagtggtggcctaactacggctacactagaagaacagtatttggtatctgcgctctgctgaagccagttaccttcggaaaaagagttggtagctcttgatccggcaaacaaaccaccgctggtagcggtggtttttttgtttgcaagcagcagattacgcgcagaaaaaaaggatctcaagaagatcctttgatcttttctacggggtctgacgctcagtggaacgaaaactcacgttaagggattttggtcatga

SEQ ID NO: 102 - DNA, 5119 bp, Artificial sequence
  Synthetic sequence
gcggccgctggtctccaatgcgtaaaggcgaagagctgttcactggtgtcgtccctattctggtggaactggatggtgatgtcaacggtcataagttttccgtgcgtggcgagggtgaaggtgacgcaactaatggtaaactgacgctgaagttcatctgtactactggtaaactgccggttccttggccgactctggtaacgacgctgacttatggtgttcagtgctttgctcgttatccggaccatatgaagcagcatgacttcttcaagtccgccatgccggaaggctatgtgcaggaacgcacgatttcctttaaggatgacggcacgtacaaaacgcgtgcggaagtgaaatttgaaggcgataccctggtaaaccgcattgagctgaaaggcattgactttaaagaagacggcaatatcctgggccataagctggaatacaattttaacagccacaatgtttacatcaccgccgataaacaaaaaaatggcattaaagcgaattttaaaattcgccacaacgtggaggatggcagcgtgcagctggctgatcactaccagcaaaacactccaatcggtgatggtcctgttctgctgccagacaatcactatctgagcacgcaaagcgttctgtctaaagatccgaacgagaaacgcgatcatatggttctgctggagttcgtaaccgcagcgggcatcacgcatggtatggatgaactgtacaaaggatctgattacaaggacgatgatgataaggactacaaagatgatgatgacaaagattataaggacgatgatgataaaggtcatcatcatcatcatcactaaatcctagctgattagctcgagaaggccatcctgacggatggccttttttttgtatcgagacgactagtgtaattgcctatcttccagtgatggaacagcatttgtgcattggctgcaacaatcagccttacttgtgcctgttctatttccgaaccgaccgcttgtatgaatccatcaaaattcgttttctctatgttggattccttgttgctcatattgtgatgataatttctacaaatatagtcattggtaactatctatgaaactgtttgatacttttatagttgattaaacttgttcatggcatttgccttaatatcatccgctatgtcaatgtagggtttcatagctttgtagtcgctgtgtcccgtccatttcatgaccacctgtgccgggattccgagagccagcgcattgcagatgaatgtccttcttcctgcatgggtactgagcaaagcgtatttgggtgtgacttcatcaatacgttcatttcccttgtagtaggtttcccgtacaggctcgttgatttctgccagttcgcccagctctttcaggtaatcgttcatcttctggttgctgatgacgggcagagccatgtaattctcgaaatggatgtccttgtatttgtccagtatggctttgctgtatttgttcagttcaatcgtcaggctgtcggcagtcttgactgtggttatttcgatgtggtcggacttcacatcgcttcttttcagattgcgaacatccgaataccgcaaactcgtaaagcagcagaacaggaaaacatcacgcacacgttccaggtattgcttatccttgggtatctggtagtctttcagcttgttcagttcatcccaagtcaggaagattacttttttcgaggtggttttcagtttcggtttgaacgtatcgtatgcaatgttctgatgatgtcctttcttgaagctccagcgcaggaaccatttgaggaatcccatttgcttgccgatggtgctgtttctcatatccttggtgtcacgcaggaagttgacgtattcgttcaatccaaactcgttgaaatagttgaacgttgcatcctccttgaactctttgaggtggttcctcactgctgcaaatttttcataggtggatgccgtccagttattctggttaccgcactcttttacaaactcatcgaacacctcccaaaagctgacaggggcttcttccggctgttcttcgctggtgtctttcattctcatgttgaaagcttccttcaactgttgggtcgttggcatgacctcctgcacctcaaattccttgaaaatattctggatttcggcatagtatttcagcaagtccgtattgatttcggctgcactttgctttagcttgttggtacatccgctctttacccgctgcttatctgcatcccatttggctacgtcaatccggtagcccgttgtaaactcgatgcgttggctggcaaagatgacacgcatacggatgggtacgttctctacgattggcacaccgttctttttccggctctccaatgcaaaaatgatgttgcgcttgatattcataattgggtgcgtttgaaattctacacccaaatatacacccaattattgagatagcaaaagacatttagaaacatttacttttactctatattgtaatttacacttgattatcagtcgtttgcagtcttatgatattctgtgaaagtataagttcgagagcctgtctctccgcaaaaaacgctgaaaatcagcagattgcaaaacaaacaccctgttttacacccaagaatgtaaagtcggctgtttttgttttatttaagataatacaaccactacataataaaagagtagcgatattaaaagaatccgatgagaaaagactaatatttatctatccattcagtttgatttttcaggactttacatcgtcctgaaagtatttgttggtaccgaggacgcgacagctgcagacgcgttatgagtaaacttggtctgacagttaccaatgcttaatcagtgaggcacctatctcagcgatctgtctatttcgttcatccatagttgcctgactccccgtcgtgtagataactacgatacgggagggcttaccatctggccccagtgctgcaatgataccgcgggacccacgctcaccggctccagatttatcagcaataaaccagccagccggaagggccgagcgcagaagtggtcctgcaactttatccgcctccatccagtctattaattgttgccgggaagctagagtaagtagttcgccagttaatagtttgcgcaacgttgttgccattgctacaggcatcgtggtgtcacgctcgtcgtttggtatggcttcattcagctccggttcccaacgatcaaggcgagttacatgatcccccatgttgtgcaaaaaagcggttagctccttcggtcctccgatcgttgtcagaagtaagttggccgcagtgttatcactcatggttatggcagcactgcataattctcttactgtcatgccatccgtaagatgcttttctgtgactggtgagtactcaaccaagtcattctgagaatagtgtatgcggcgaccgagtgagaccacctgcaggaaggccatcctgacggatggccttttttttagacggttatccacagaatcaggggataacgcaggaaagaacatgtgagcaaaaggccagcaaaaggccaggaaccgtaaaaaggccgcgttgctggcgtttttccataggctccgcccccctgacgagcatcacaaaaatcgacgctcaagtcagaggtggcgaaacccgacaggactataaagataccaggcgtttccccctggaagctccctcgtgcgctctcctgttccgaccctgccgcttaccggatacctgtccgcctttctcccttcgggaagcgtggcgctttctcatagctcacgctgtaggtatctcagttcggtgtaggtcgttcgctccaagctgggctgtgtgcacgaaccccccgttcagcccgaccgctgcgccttatccggtaactatcgtcttgagtccaacccggtaagacacgacttatcgccactggcagcagccactggtaacaggattagcagagcgaggtatgtaggcggtgctacagagttcttgaagtggtggcctaactacggctacactagaagaacagtatttggtatctgcgctctgctgaagccagttaccttcggaaaaagagttggtagctcttgatccggcaaacaaaccaccgctggtagcggtggtttttttgtttgcaagcagcagattacgcgcagaaaaaaaggatctcaagaagatcctttgatcttttctacggggtctgacgctcagtggaacgaaaactcacgttaagggattttggtcatgattgatcgggcacgtaagaggttccaactttcaccataatgaaataagatcactaccgggcgtattttttgagttatcgagattttcaggagctaaggaagctaaaatggagaaaaaaatcactggatataccaccgttgatatatcccaatggcatcgtaaagaacattttgaggcatttcagtcagttgctcaatgtacctataaccagaccgttcagctggatattacggcctttttaaagaccgtaaagaaaaataagcacaagttttatccggcctttattcacattcttgcccgcctgatgaatgctcatccggaatttcgtatggcaatgaaagacggtgagctggtgatatgggatagtgttcacccttgttacaccgttttccatgagcaaactgaaacgttttcatcgctctggagtgaataccacgacgatttccggcagtttctacacatatattcgcaagatgtggcgtgttacggtgaaaacctggcctatttccctaaagggtttattgagaatatgtttttcgtttcagccaatccctgggtgagtttcaccagttttgatttaaacgtggccaatatggacaacttcttcgcccccgttttcaccatgggcaaatattatacgcaaggcgacaaggtgctgatgccgctggcgattcaggttcatcatgccgtttgtgatggcttccatgtcggcagaatgcttaatgaattacaacagtactgcgatgagtggcagggcggggcgtaatttgatatcgagctcgcttggactcctgttgatagatccagtaatgacctcagaactccatctggatttgttcagaacgctcggttgccgccgggcgttttttattggtag

SEQ ID NO: 103 - DNA, 5014 bp, Artificial sequence
  Synthetic sequence
gcggccgctggtctccaatggtttcgaaaggggaagaagataacatggctatcattaaggagtttatgcgcttcaaggtgcacatggagggctctgtcaacggccacgagttcgaaatcgaaggtgaaggtgaaggtcgtccgtacgaaggtactcagaccgcaaagttgaaagttacaaaaggaggtccgttgcctttcgcttgggacattctgagcccgcaatttatgtacgggagcaaagcctatgttaaacatccggcggatattcccgattacctgaaactgtcattcccggaggggttcaagtgggaacgcgtcatgaactttgaagacggtggcgtggttacagtgactcaggattcgtcccttcaagatggcgaatttatctacaaagtcaaactgcgcgggacaaattttccgagtgacggtcctgttatgcagaagaagaccatggggtgggaagcaagctccgaacgcatgtaccccgaggacggtgcactcaaaggagaaatcaagcagcgtctgaaactgaaagatggcgggcactacgatgcagaagtgaaaaccacctataaggcgaaaaagcctgtacaactgccgggtgcctataatgtgaacattaaactggatataacgagtcacaacgaagactatacaatcgtcgagcagtatgagcgtgcggaaggacgtcattccactggtggaatggatgaactgtataagtaaatcctagctgattagctcgagaaggccatcctgacggatggccttttttttgtatcgagacgactagtgtaattgcctatcttccagtgatggaacagcatttgtgcattggctgcaacaatcagccttacttgtgcctgttctatttccgaaccgaccgcttgtatgaatccatcaaaattcgttttctctatgttggattccttgttgctcatattgtgatgataatttctacaaatatagtcattggtaactatctatgaaactgtttgatacttttatagttgattaaacttgttcatggcatttgccttaatatcatccgctatgtcaatgtagggtttcatagctttgtagtcgctgtgtcccgtccatttcatgaccacctgtgccgggattccgagagccagcgcattgcagatgaatgtccttcttcctgcatgggtactgagcaaagcgtatttgggtgtgacttcatcaatacgttcatttcccttgtagtaggtttcccgtacaggctcgttgatttctgccagttcgcccagctctttcaggtaatcgttcatcttctggttgctgatgacgggcagagccatgtaattctcgaaatggatgtccttgtatttgtccagtatggctttgctgtatttgttcagttcaatcgtcaggctgtcggcagtcttgactgtggttatttcgatgtggtcggacttcacatcgcttcttttcagattgcgaacatccgaataccgcaaactcgtaaagcagcagaacaggaaaacatcacgcacacgttccaggtattgcttatccttgggtatctggtagtctttcagcttgttcagttcatcccaagtcaggaagattacttttttcgaggtggttttcagtttcggtttgaacgtatcgtatgcaatgttctgatgatgtcctttcttgaagctccagcgcaggaaccatttgaggaatcccatttgcttgccgatggtgctgtttctcatatccttggtgtcacgcaggaagttgacgtattcgttcaatccaaactcgttgaaatagttgaacgttgcatcctccttgaactctttgaggtggttcctcactgctgcaaatttttcataggtggatgccgtccagttattctggttaccgcactcttttacaaactcatcgaacacctcccaaaagctgacaggggcttcttccggctgttcttcgctggtgtctttcattctcatgttgaaagcttccttcaactgttgggtcgttggcatgacctcctgcacctcaaattccttgaaaatattctggatttcggcatagtatttcagcaagtccgtattgatttcggctgcactttgctttagcttgttggtacatccgctctttacccgctgcttatctgcatcccatttggctacgtcaatccggtagcccgttgtaaactcgatgcgttggctggcaaagatgacacgcatacggatgggtacgttctctacgattggcacaccgttctttttccggctctccaatgcaaaaatgatgttgcgcttgatattcataattgggtgcgtttgaaattctacacccaaatatacacccaattattgagatagcaaaagacatttagaaacatttacttttactctatattgtaatttacacttgattatcagtcgtttgcagtcttatgatattctgtgaaagtataagttcgagagcctgtctctccgcaaaaaacgctgaaaatcagcagattgcaaaacaaacaccctgttttacacccaagaatgtaaagtcggctgtttttgttttatttaagataatacaaccactacataataaaagagtagcgatattaaaagaatccgatgagaaaagactaatatttatctatccattcagtttgatttttcaggactttacatcgtcctgaaagtatttgttggtaccgaggacgcgacagctgcagacgcgttatgagtaaacttggtctgacagttaccaatgcttaatcagtgaggcacctatctcagcgatctgtctatttcgttcatccatagttgcctgactccccgtcgtgtagataactacgatacgggagggcttaccatctggccccagtgctgcaatgataccgcgggacccacgctcaccggctccagatttatcagcaataaaccagccagccggaagggccgagcgcagaagtggtcctgcaactttatccgcctccatccagtctattaattgttgccgggaagctagagtaagtagttcgccagttaatagtttgcgcaacgttgttgccattgctacaggcatcgtggtgtcacgctcgtcgtttggtatggcttcattcagctccggttcccaacgatcaaggcgagttacatgatcccccatgttgtgcaaaaaagcggttagctccttcggtcctccgatcgttgtcagaagtaagttggccgcagtgttatcactcatggttatggcagcactgcataattctcttactgtcatgccatccgtaagatgcttttctgtgactggtgagtactcaaccaagtcattctgagaatagtgtatgcggcgaccgagtgagaccacctgcaggaaggccatcctgacggatggccttttttttagacggttatccacagaatcaggggataacgcaggaaagaacatgtgagcaaaaggccagcaaaaggccaggaaccgtaaaaaggccgcgttgctggcgtttttccataggctccgcccccctgacgagcatcacaaaaatcgacgctcaagtcagaggtggcgaaacccgacaggactataaagataccaggcgtttccccctggaagctccctcgtgcgctctcctgttccgaccctgccgcttaccggatacctgtccgcctttctcccttcgggaagcgtggcgctttctcatagctcacgctgtaggtatctcagttcggtgtaggtcgttcgctccaagctgggctgtgtgcacgaaccccccgttcagcccgaccgctgcgccttatccggtaactatcgtcttgagtccaacccggtaagacacgacttatcgccactggcagcagccactggtaacaggattagcagagcgaggtatgtaggcggtgctacagagttcttgaagtggtggcctaactacggctacactagaagaacagtatttggtatctgcgctctgctgaagccagttaccttcggaaaaagagttggtagctcttgatccggcaaacaaaccaccgctggtagcggtggtttttttgtttgcaagcagcagattacgcgcagaaaaaaaggatctcaagaagatcctttgatcttttctacggggtctgacgctcagtggaacgaaaactcacgttaagggattttggtcatgattgatcgggcacgtaagaggttccaactttcaccataatgaaataagatcactaccgggcgtattttttgagttatcgagattttcaggagctaaggaagctaaaatggagaaaaaaatcactggatataccaccgttgatatatcccaatggcatcgtaaagaacattttgaggcatttcagtcagttgctcaatgtacctataaccagaccgttcagctggatattacggcctttttaaagaccgtaaagaaaaataagcacaagttttatccggcctttattcacattcttgcccgcctgatgaatgctcatccggaatttcgtatggcaatgaaagacggtgagctggtgatatgggatagtgttcacccttgttacaccgttttccatgagcaaactgaaacgttttcatcgctctggagtgaataccacgacgatttccggcagtttctacacatatattcgcaagatgtggcgtgttacggtgaaaacctggcctatttccctaaagggtttattgagaatatgtttttcgtttcagccaatccctgggtgagtttcaccagttttgatttaaacgtggccaatatggacaacttcttcgcccccgttttcaccatgggcaaatattatacgcaaggcgacaaggtgctgatgccgctggcgattcaggttcatcatgccgtttgtgatggcttccatgtcggcagaatgcttaatgaattacaacagtactgcgatgagtggcagggcggggcgtaatttgatatcgagctcgcttggactcctgttgatagatccagtaatgacctcagaactccatctggatttgttcagaacgctcggttgccgccgggcgttttttattggtag

SEQ ID NO: 104 - DNA, 4819 bp, Artificial sequence
  Synthetic sequence
gcggccgctggtctccaatggtttttactctggaagattttgttggcgattggcgtcagaccgcgggttataatttggatcaagtcctggaacagggtggcgtaagctctctgttccagaacctgggtgtgagcgtgacgccgattcagcgcatcgttctgtccggcgagaacggtctgaaaattgatattcatgtgatcatcccgtacgaaggcctgagcggtgaccaaatgggtcaaatcgagaaaatctttaaagtcgtctacccagttgacgatcaccacttcaaggttatcttgcattacggtacgctggtgattgatggtgtgaccccgaatatgattgactatttcggccgtccgtatgaaggcattgccgtttttgacggtaaaaagatcaccgtcaccggtaccctgtggaatggcaataagattattgacgagcgtctgattaacccggacggcagcctgctgttccgcgtgaccatcaacggtgtcacgggttggcgtctgtgcgagcgcatcctggcataaatcctagctgattagctcgagaaggccatcctgacggatggccttttttttgtatcgagacgactagtgtaattgcctatcttccagtgatggaacagcatttgtgcattggctgcaacaatcagccttacttgtgcctgttctatttccgaaccgaccgcttgtatgaatccatcaaaattcgttttctctatgttggattccttgttgctcatattgtgatgataatttctacaaatatagtcattggtaactatctatgaaactgtttgatacttttatagttgattaaacttgttcatggcatttgccttaatatcatccgctatgtcaatgtagggtttcatagctttgtagtcgctgtgtcccgtccatttcatgaccacctgtgccgggattccgagagccagcgcattgcagatgaatgtccttcttcctgcatgggtactgagcaaagcgtatttgggtgtgacttcatcaatacgttcatttcccttgtagtaggtttcccgtacaggctcgttgatttctgccagttcgcccagctctttcaggtaatcgttcatcttctggttgctgatgacgggcagagccatgtaattctcgaaatggatgtccttgtatttgtccagtatggctttgctgtatttgttcagttcaatcgtcaggctgtcggcagtcttgactgtggttatttcgatgtggtcggacttcacatcgcttcttttcagattgcgaacatccgaataccgcaaactcgtaaagcagcagaacaggaaaacatcacgcacacgttccaggtattgcttatccttgggtatctggtagtctttcagcttgttcagttcatcccaagtcaggaagattacttttttcgaggtggttttcagtttcggtttgaacgtatcgtatgcaatgttctgatgatgtcctttcttgaagctccagcgcaggaaccatttgaggaatcccatttgcttgccgatggtgctgtttctcatatccttggtgtcacgcaggaagttgacgtattcgttcaatccaaactcgttgaaatagttgaacgttgcatcctccttgaactctttgaggtggttcctcactgctgcaaatttttcataggtggatgccgtccagttattctggttaccgcactcttttacaaactcatcgaacacctcccaaaagctgacaggggcttcttccggctgttcttcgctggtgtctttcattctcatgttgaaagcttccttcaactgttgggtcgttggcatgacctcctgcacctcaaattccttgaaaatattctggatttcggcatagtatttcagcaagtccgtattgatttcggctgcactttgctttagcttgttggtacatccgctctttacccgctgcttatctgcatcccatttggctacgtcaatccggtagcccgttgtaaactcgatgcgttggctggcaaagatgacacgcatacggatgggtacgttctctacgattggcacaccgttctttttccggctctccaatgcaaaaatgatgttgcgcttgatattcataattgggtgcgtttgaaattctacacccaaatatacacccaattattgagatagcaaaagacatttagaaacatttacttttactctatattgtaatttacacttgattatcagtcgtttgcagtcttatgatattctgtgaaagtataagttcgagagcctgtctctccgcaaaaaacgctgaaaatcagcagattgcaaaacaaacaccctgttttacacccaagaatgtaaagtcggctgtttttgttttatttaagataatacaaccactacataataaaagagtagcgatattaaaagaatccgatgagaaaagactaatatttatctatccattcagtttgatttttcaggactttacatcgtcctgaaagtatttgttggtaccgaggacgcgacagctgcagacgcgttatgagtaaacttggtctgacagttaccaatgcttaatcagtgaggcacctatctcagcgatctgtctatttcgttcatccatagttgcctgactccccgtcgtgtagataactacgatacgggagggcttaccatctggccccagtgctgcaatgataccgcgggacccacgctcaccggctccagatttatcagcaataaaccagccagccggaagggccgagcgcagaagtggtcctgcaactttatccgcctccatccagtctattaattgttgccgggaagctagagtaagtagttcgccagttaatagtttgcgcaacgttgttgccattgctacaggcatcgtggtgtcacgctcgtcgtttggtatggcttcattcagctccggttcccaacgatcaaggcgagttacatgatcccccatgttgtgcaaaaaagcggttagctccttcggtcctccgatcgttgtcagaagtaagttggccgcagtgttatcactcatggttatggcagcactgcataattctcttactgtcatgccatccgtaagatgcttttctgtgactggtgagtactcaaccaagtcattctgagaatagtgtatgcggcgaccgagtgagaccacctgcaggaaggccatcctgacggatggccttttttttagacggttatccacagaatcaggggataacgcaggaaagaacatgtgagcaaaaggccagcaaaaggccaggaaccgtaaaaaggccgcgttgctggcgtttttccataggctccgcccccctgacgagcatcacaaaaatcgacgctcaagtcagaggtggcgaaacccgacaggactataaagataccaggcgtttccccctggaagctccctcgtgcgctctcctgttccgaccctgccgcttaccggatacctgtccgcctttctcccttcgggaagcgtggcgctttctcatagctcacgctgtaggtatctcagttcggtgtaggtcgttcgctccaagctgggctgtgtgcacgaaccccccgttcagcccgaccgctgcgccttatccggtaactatcgtcttgagtccaacccggtaagacacgacttatcgccactggcagcagccactggtaacaggattagcagagcgaggtatgtaggcggtgctacagagttcttgaagtggtggcctaactacggctacactagaagaacagtatttggtatctgcgctctgctgaagccagttaccttcggaaaaagagttggtagctcttgatccggcaaacaaaccaccgctggtagcggtggtttttttgtttgcaagcagcagattacgcgcagaaaaaaaggatctcaagaagatcctttgatcttttctacggggtctgacgctcagtggaacgaaaactcacgttaagggattttggtcatgattgatcgggcacgtaagaggttccaactttcaccataatgaaataagatcactaccgggcgtattttttgagttatcgagattttcaggagctaaggaagctaaaatggagaaaaaaatcactggatataccaccgttgatatatcccaatggcatcgtaaagaacattttgaggcatttcagtcagttgctcaatgtacctataaccagaccgttcagctggatattacggcctttttaaagaccgtaaagaaaaataagcacaagttttatccggcctttattcacattcttgcccgcctgatgaatgctcatccggaatttcgtatggcaatgaaagacggtgagctggtgatatgggatagtgttcacccttgttacaccgttttccatgagcaaactgaaacgttttcatcgctctggagtgaataccacgacgatttccggcagtttctacacatatattcgcaagatgtggcgtgttacggtgaaaacctggcctatttccctaaagggtttattgagaatatgtttttcgtttcagccaatccctgggtgagtttcaccagttttgatttaaacgtggccaatatggacaacttcttcgcccccgttttcaccatgggcaaatattatacgcaaggcgacaaggtgctgatgccgctggcgattcaggttcatcatgccgtttgtgatggcttccatgtcggcagaatgcttaatgaattacaacagtactgcgatgagtggcagggcggggcgtaatttgatatcgagctcgcttggactcctgttgatagatccagtaatgacctcagaactccatctggatttgttcagaacgctcggttgccgccgggcgttttttattggtag

SEQ ID NO: 105 - DNA, 1876 bp, Artificial sequence
  Synthetic sequence
gcggccgctggtctcctctagataaaacgaaaggctcagtcgaaagactgggcctttcgttttacaattgggctaccttttttttgtaaaaaaaaaccccgcccctgacagggcggggttttttttttcacttgaactttcaaataatgttcttataaaaccagtgtcgaaagaaacaaagtaggacttgagaccacctgcaggaaggccatcctgacggatggccttttttttagacggttatccacagaatcaggggataacgcaggaaagaacatgtgagcaaaaggccagcaaaaggccaggaaccgtaaaaaggccgcgttgctggcgtttttccataggctccgcccccctgacgagcatcacaaaaatcgacgctcaagtcagaggtggcgaaacccgacaggactataaagataccaggcgtttccccctggaagctccctcgtgcgctctcctgttccgaccctgccgcttaccggatacctgtccgcctttctcccttcgggaagcgtggcgctttctcatagctcacgctgtaggtatctcagttcggtgtaggtcgttcgctccaagctgggctgtgtgcacgaaccccccgttcagcccgaccgctgcgccttatccggtaactatcgtcttgagtccaacccggtaagacacgacttatcgccactggcagcagccactggtaacaggattagcagagcgaggtatgtaggcggtgctacagagttcttgaagtggtggcctaactacggctacactagaagaacagtatttggtatctgcgctctgctgaagccagttaccttcggaaaaagagttggtagctcttgatccggcaaacaaaccaccgctggtagcggtggtttttttgtttgcaagcagcagattacgcgcagaaaaaaaggatctcaagaagatcctttgatcttttctacggggtctgacgctcagtggaacgaaaactcacgttaagggattttggtcatgattgatcgggcacgtaagaggttccaactttcaccataatgaaataagatcactaccgggcgtattttttgagttatcgagattttcaggagctaaggaagctaaaatggagaaaaaaatcactggatataccaccgttgatatatcccaatggcatcgtaaagaacattttgaggcatttcagtcagttgctcaatgtacctataaccagaccgttcagctggatattacggcctttttaaagaccgtaaagaaaaataagcacaagttttatccggcctttattcacattcttgcccgcctgatgaatgctcatccggaatttcgtatggcaatgaaagacggtgagctggtgatatgggatagtgttcacccttgttacaccgttttccatgagcaaactgaaacgttttcatcgctctggagtgaataccacgacgatttccggcagtttctacacatatattcgcaagatgtggcgtgttacggtgaaaacctggcctatttccctaaagggtttattgagaatatgtttttcgtttcagccaatccctgggtgagtttcaccagttttgatttaaacgtggccaatatggacaacttcttcgcccccgttttcaccatgggcaaatattatacgcaaggcgacaaggtgctgatgccgctggcgattcaggttcatcatgccgtttgtgatggcttccatgtcggcagaatgcttaatgaattacaacagtactgcgatgagtggcagggcggggcgtaatttgatatcgagctcgcttggactcctgttgatagatccagtaatgacctcagaactccatctggatttgttcagaacgctcggttgccgccgggcgttttttattggtag

SEQ ID NO: 106 - DNA, 1876 bp, Artificial sequence
  Synthetic sequence
gcggccgctggtctcctctagataaaacgaaaggctcagtcgaaagactgggcctttcgttttacaattgggctaccttttttttgtaaaaaaaaaccccgcccctgacagggcggggttttttttttcacttgaactttcaaataatgttcttatatatgcagtgtcgaaagaaacaaagtaggacttgagaccacctgcaggaaggccatcctgacggatggccttttttttagacggttatccacagaatcaggggataacgcaggaaagaacatgtgagcaaaaggccagcaaaaggccaggaaccgtaaaaaggccgcgttgctggcgtttttccataggctccgcccccctgacgagcatcacaaaaatcgacgctcaagtcagaggtggcgaaacccgacaggactataaagataccaggcgtttccccctggaagctccctcgtgcgctctcctgttccgaccctgccgcttaccggatacctgtccgcctttctcccttcgggaagcgtggcgctttctcatagctcacgctgtaggtatctcagttcggtgtaggtcgttcgctccaagctgggctgtgtgcacgaaccccccgttcagcccgaccgctgcgccttatccggtaactatcgtcttgagtccaacccggtaagacacgacttatcgccactggcagcagccactggtaacaggattagcagagcgaggtatgtaggcggtgctacagagttcttgaagtggtggcctaactacggctacactagaagaacagtatttggtatctgcgctctgctgaagccagttaccttcggaaaaagagttggtagctcttgatccggcaaacaaaccaccgctggtagcggtggtttttttgtttgcaagcagcagattacgcgcagaaaaaaaggatctcaagaagatcctttgatcttttctacggggtctgacgctcagtggaacgaaaactcacgttaagggattttggtcatgattgatcgggcacgtaagaggttccaactttcaccataatgaaataagatcactaccgggcgtattttttgagttatcgagattttcaggagctaaggaagctaaaatggagaaaaaaatcactggatataccaccgttgatatatcccaatggcatcgtaaagaacattttgaggcatttcagtcagttgctcaatgtacctataaccagaccgttcagctggatattacggcctttttaaagaccgtaaagaaaaataagcacaagttttatccggcctttattcacattcttgcccgcctgatgaatgctcatccggaatttcgtatggcaatgaaagacggtgagctggtgatatgggatagtgttcacccttgttacaccgttttccatgagcaaactgaaacgttttcatcgctctggagtgaataccacgacgatttccggcagtttctacacatatattcgcaagatgtggcgtgttacggtgaaaacctggcctatttccctaaagggtttattgagaatatgtttttcgtttcagccaatccctgggtgagtttcaccagttttgatttaaacgtggccaatatggacaacttcttcgcccccgttttcaccatgggcaaatattatacgcaaggcgacaaggtgctgatgccgctggcgattcaggttcatcatgccgtttgtgatggcttccatgtcggcagaatgcttaatgaattacaacagtactgcgatgagtggcagggcggggcgtaatttgatatcgagctcgcttggactcctgttgatagatccagtaatgacctcagaactccatctggatttgttcagaacgctcggttgccgccgggcgttttttattggtag

SEQ ID NO: 107 - DNA, 1876 bp, Artificial sequence
  Synthetic sequence
gcggccgctggtctcctctagataaaacgaaaggctcagtcgaaagactgggcctttcgttttacaattgggctaccttttttttgttttgtttgcaatggttaatctattgttaaaatttaaagtttcacttgaactttcaaataatgttcttatatgtgcagtgtcgaaagaaacaaagtaggacttgagaccacctgcaggaaggccatcctgacggatggccttttttttagacggttatccacagaatcaggggataacgcaggaaagaacatgtgagcaaaaggccagcaaaaggccaggaaccgtaaaaaggccgcgttgctggcgtttttccataggctccgcccccctgacgagcatcacaaaaatcgacgctcaagtcagaggtggcgaaacccgacaggactataaagataccaggcgtttccccctggaagctccctcgtgcgctctcctgttccgaccctgccgcttaccggatacctgtccgcctttctcccttcgggaagcgtggcgctttctcatagctcacgctgtaggtatctcagttcggtgtaggtcgttcgctccaagctgggctgtgtgcacgaaccccccgttcagcccgaccgctgcgccttatccggtaactatcgtcttgagtccaacccggtaagacacgacttatcgccactggcagcagccactggtaacaggattagcagagcgaggtatgtaggcggtgctacagagttcttgaagtggtggcctaactacggctacactagaagaacagtatttggtatctgcgctctgctgaagccagttaccttcggaaaaagagttggtagctcttgatccggcaaacaaaccaccgctggtagcggtggtttttttgtttgcaagcagcagattacgcgcagaaaaaaaggatctcaagaagatcctttgatcttttctacggggtctgacgctcagtggaacgaaaactcacgttaagggattttggtcatgattgatcgggcacgtaagaggttccaactttcaccataatgaaataagatcactaccgggcgtattttttgagttatcgagattttcaggagctaaggaagctaaaatggagaaaaaaatcactggatataccaccgttgatatatcccaatggcatcgtaaagaacattttgaggcatttcagtcagttgctcaatgtacctataaccagaccgttcagctggatattacggcctttttaaagaccgtaaagaaaaataagcacaagttttatccggcctttattcacattcttgcccgcctgatgaatgctcatccggaatttcgtatggcaatgaaagacggtgagctggtgatatgggatagtgttcacccttgttacaccgttttccatgagcaaactgaaacgttttcatcgctctggagtgaataccacgacgatttccggcagtttctacacatatattcgcaagatgtggcgtgttacggtgaaaacctggcctatttccctaaagggtttattgagaatatgtttttcgtttcagccaatccctgggtgagtttcaccagttttgatttaaacgtggccaatatggacaacttcttcgcccccgttttcaccatgggcaaatattatacgcaaggcgacaaggtgctgatgccgctggcgattcaggttcatcatgccgtttgtgatggcttccatgtcggcagaatgcttaatgaattacaacagtactgcgatgagtggcagggcggggcgtaatttgatatcgagctcgcttggactcctgttgatagatccagtaatgacctcagaactccatctggatttgttcagaacgctcggttgccgccgggcgttttttattggtag

SEQ ID NO: 108 - DNA, 1876 bp, Artificial sequence
  Synthetic sequence
gcggccgctggtctcctctagataaaacgaaaggctcagtcgaaagactgggcctttcgttttacaattgggctaccttttttttgttttgtttgcaatggttaatctattgttaacatttaaagtttcacttgaactttcaaataatgttcttatattttcagtgtcgaaagaaacaaagtaggacttgagaccacctgcaggaaggccatcctgacggatggccttttttttagacggttatccacagaatcaggggataacgcaggaaagaacatgtgagcaaaaggccagcaaaaggccaggaaccgtaaaaaggccgcgttgctggcgtttttccataggctccgcccccctgacgagcatcacaaaaatcgacgctcaagtcagaggtggcgaaacccgacaggactataaagataccaggcgtttccccctggaagctccctcgtgcgctctcctgttccgaccctgccgcttaccggatacctgtccgcctttctcccttcgggaagcgtggcgctttctcatagctcacgctgtaggtatctcagttcggtgtaggtcgttcgctccaagctgggctgtgtgcacgaaccccccgttcagcccgaccgctgcgccttatccggtaactatcgtcttgagtccaacccggtaagacacgacttatcgccactggcagcagccactggtaacaggattagcagagcgaggtatgtaggcggtgctacagagttcttgaagtggtggcctaactacggctacactagaagaacagtatttggtatctgcgctctgctgaagccagttaccttcggaaaaagagttggtagctcttgatccggcaaacaaaccaccgctggtagcggtggtttttttgtttgcaagcagcagattacgcgcagaaaaaaaggatctcaagaagatcctttgatcttttctacggggtctgacgctcagtggaacgaaaactcacgttaagggattttggtcatgattgatcgggcacgtaagaggttccaactttcaccataatgaaataagatcactaccgggcgtattttttgagttatcgagattttcaggagctaaggaagctaaaatggagaaaaaaatcactggatataccaccgttgatatatcccaatggcatcgtaaagaacattttgaggcatttcagtcagttgctcaatgtacctataaccagaccgttcagctggatattacggcctttttaaagaccgtaaagaaaaataagcacaagttttatccggcctttattcacattcttgcccgcctgatgaatgctcatccggaatttcgtatggcaatgaaagacggtgagctggtgatatgggatagtgttcacccttgttacaccgttttccatgagcaaactgaaacgttttcatcgctctggagtgaataccacgacgatttccggcagtttctacacatatattcgcaagatgtggcgtgttacggtgaaaacctggcctatttccctaaagggtttattgagaatatgtttttcgtttcagccaatccctgggtgagtttcaccagttttgatttaaacgtggccaatatggacaacttcttcgcccccgttttcaccatgggcaaatattatacgcaaggcgacaaggtgctgatgccgctggcgattcaggttcatcatgccgtttgtgatggcttccatgtcggcagaatgcttaatgaattacaacagtactgcgatgagtggcagggcggggcgtaatttgatatcgagctcgcttggactcctgttgatagatccagtaatgacctcagaactccatctggatttgttcagaacgctcggttgccgccgggcgttttttattggtag

SEQ ID NO: 109 - DNA, 1876 bp, Artificial sequence
  Synthetic sequence
gcggccgctggtctcctctagataaaacgaaaggctcagtcgaaagactgggcctttcgttttacaattgggctaccttttttttgttttgtttgcaatggttaatctattgttaaaatttaaagtttcacttgaactttcaaataatgttcttctatttgcagtgtcgaaagaaacaaagtaggacttgagaccacctgcaggaaggccatcctgacggatggccttttttttagacggttatccacagaatcaggggataacgcaggaaagaacatgtgagcaaaaggccagcaaaaggccaggaaccgtaaaaaggccgcgttgctggcgtttttccataggctccgcccccctgacgagcatcacaaaaatcgacgctcaagtcagaggtggcgaaacccgacaggactataaagataccaggcgtttccccctggaagctccctcgtgcgctctcctgttccgaccctgccgcttaccggatacctgtccgcctttctcccttcgggaagcgtggcgctttctcatagctcacgctgtaggtatctcagttcggtgtaggtcgttcgctccaagctgggctgtgtgcacgaaccccccgttcagcccgaccgctgcgccttatccggtaactatcgtcttgagtccaacccggtaagacacgacttatcgccactggcagcagccactggtaacaggattagcagagcgaggtatgtaggcggtgctacagagttcttgaagtggtggcctaactacggctacactagaagaacagtatttggtatctgcgctctgctgaagccagttaccttcggaaaaagagttggtagctcttgatccggcaaacaaaccaccgctggtagcggtggtttttttgtttgcaagcagcagattacgcgcagaaaaaaaggatctcaagaagatcctttgatcttttctacggggtctgacgctcagtggaacgaaaactcacgttaagggattttggtcatgattgatcgggcacgtaagaggttccaactttcaccataatgaaataagatcactaccgggcgtattttttgagttatcgagattttcaggagctaaggaagctaaaatggagaaaaaaatcactggatataccaccgttgatatatcccaatggcatcgtaaagaacattttgaggcatttcagtcagttgctcaatgtacctataaccagaccgttcagctggatattacggcctttttaaagaccgtaaagaaaaataagcacaagttttatccggcctttattcacattcttgcccgcctgatgaatgctcatccggaatttcgtatggcaatgaaagacggtgagctggtgatatgggatagtgttcacccttgttacaccgttttccatgagcaaactgaaacgttttcatcgctctggagtgaataccacgacgatttccggcagtttctacacatatattcgcaagatgtggcgtgttacggtgaaaacctggcctatttccctaaagggtttattgagaatatgtttttcgtttcagccaatccctgggtgagtttcaccagttttgatttaaacgtggccaatatggacaacttcttcgcccccgttttcaccatgggcaaatattatacgcaaggcgacaaggtgctgatgccgctggcgattcaggttcatcatgccgtttgtgatggcttccatgtcggcagaatgcttaatgaattacaacagtactgcgatgagtggcagggcggggcgtaatttgatatcgagctcgcttggactcctgttgatagatccagtaatgacctcagaactccatctggatttgttcagaacgctcggttgccgccgggcgttttttattggtag

SEQ ID NO: 110 - DNA, 1876 bp, Artificial sequence
  Synthetic sequence
gcggccgctggtctcctctagataaaacgaaaggctcagtcgaaagactgggcctttcgttttacaattgggctaccttttttttgttttgtttgcaatggttaatctattgttaaaatttaaagtttcacttgaactttcaaataatgttcttatatttccagtgtcgaaagaaacaaagtaggacttgagaccacctgcaggaaggccatcctgacggatggccttttttttagacggttatccacagaatcaggggataacgcaggaaagaacatgtgagcaaaaggccagcaaaaggccaggaaccgtaaaaaggccgcgttgctggcgtttttccataggctccgcccccctgacgagcatcacaaaaatcgacgctcaagtcagaggtggcgaaacccgacaggactataaagataccaggcgtttccccctggaagctccctcgtgcgctctcctgttccgaccctgccgcttaccggatacctgtccgcctttctcccttcgggaagcgtggcgctttctcatagctcacgctgtaggtatctcagttcggtgtaggtcgttcgctccaagctgggctgtgtgcacgaaccccccgttcagcccgaccgctgcgccttatccggtaactatcgtcttgagtccaacccggtaagacacgacttatcgccactggcagcagccactggtaacaggattagcagagcgaggtatgtaggcggtgctacagagttcttgaagtggtggcctaactacggctacactagaagaacagtatttggtatctgcgctctgctgaagccagttaccttcggaaaaagagttggtagctcttgatccggcaaacaaaccaccgctggtagcggtggtttttttgtttgcaagcagcagattacgcgcagaaaaaaaggatctcaagaagatcctttgatcttttctacggggtctgacgctcagtggaacgaaaactcacgttaagggattttggtcatgattgatcgggcacgtaagaggttccaactttcaccataatgaaataagatcactaccgggcgtattttttgagttatcgagattttcaggagctaaggaagctaaaatggagaaaaaaatcactggatataccaccgttgatatatcccaatggcatcgtaaagaacattttgaggcatttcagtcagttgctcaatgtacctataaccagaccgttcagctggatattacggcctttttaaagaccgtaaagaaaaataagcacaagttttatccggcctttattcacattcttgcccgcctgatgaatgctcatccggaatttcgtatggcaatgaaagacggtgagctggtgatatgggatagtgttcacccttgttacaccgttttccatgagcaaactgaaacgttttcatcgctctggagtgaataccacgacgatttccggcagtttctacacatatattcgcaagatgtggcgtgttacggtgaaaacctggcctatttccctaaagggtttattgagaatatgtttttcgtttcagccaatccctgggtgagtttcaccagttttgatttaaacgtggccaatatggacaacttcttcgcccccgttttcaccatgggcaaatattatacgcaaggcgacaaggtgctgatgccgctggcgattcaggttcatcatgccgtttgtgatggcttccatgtcggcagaatgcttaatgaattacaacagtactgcgatgagtggcagggcggggcgtaatttgatatcgagctcgcttggactcctgttgatagatccagtaatgacctcagaactccatctggatttgttcagaacgctcggttgccgccgggcgttttttattggtag

SEQ ID NO: 111 - DNA, 1876 bp, Artificial sequence
  Synthetic sequence
gcggccgctggtctcctctagataaaacgaaaggctcagtcgaaagactgggcctttcgttttacaattgggctaccttttttttgttttgtttgcaatggttaatctattgttgaaatttaaagtttcacttgaactttcaaataatgttcttatatttgcagtgtcgaaagaaacaaagtaggacttgagaccacctgcaggaaggccatcctgacggatggccttttttttagacggttatccacagaatcaggggataacgcaggaaagaacatgtgagcaaaaggccagcaaaaggccaggaaccgtaaaaaggccgcgttgctggcgtttttccataggctccgcccccctgacgagcatcacaaaaatcgacgctcaagtcagaggtggcgaaacccgacaggactataaagataccaggcgtttccccctggaagctccctcgtgcgctctcctgttccgaccctgccgcttaccggatacctgtccgcctttctcccttcgggaagcgtggcgctttctcatagctcacgctgtaggtatctcagttcggtgtaggtcgttcgctccaagctgggctgtgtgcacgaaccccccgttcagcccgaccgctgcgccttatccggtaactatcgtcttgagtccaacccggtaagacacgacttatcgccactggcagcagccactggtaacaggattagcagagcgaggtatgtaggcggtgctacagagttcttgaagtggtggcctaactacggctacactagaagaacagtatttggtatctgcgctctgctgaagccagttaccttcggaaaaagagttggtagctcttgatccggcaaacaaaccaccgctggtagcggtggtttttttgtttgcaagcagcagattacgcgcagaaaaaaaggatctcaagaagatcctttgatcttttctacggggtctgacgctcagtggaacgaaaactcacgttaagggattttggtcatgattgatcgggcacgtaagaggttccaactttcaccataatgaaataagatcactaccgggcgtattttttgagttatcgagattttcaggagctaaggaagctaaaatggagaaaaaaatcactggatataccaccgttgatatatcccaatggcatcgtaaagaacattttgaggcatttcagtcagttgctcaatgtacctataaccagaccgttcagctggatattacggcctttttaaagaccgtaaagaaaaataagcacaagttttatccggcctttattcacattcttgcccgcctgatgaatgctcatccggaatttcgtatggcaatgaaagacggtgagctggtgatatgggatagtgttcacccttgttacaccgttttccatgagcaaactgaaacgttttcatcgctctggagtgaataccacgacgatttccggcagtttctacacatatattcgcaagatgtggcgtgttacggtgaaaacctggcctatttccctaaagggtttattgagaatatgtttttcgtttcagccaatccctgggtgagtttcaccagttttgatttaaacgtggccaatatggacaacttcttcgcccccgttttcaccatgggcaaatattatacgcaaggcgacaaggtgctgatgccgctggcgattcaggttcatcatgccgtttgtgatggcttccatgtcggcagaatgcttaatgaattacaacagtactgcgatgagtggcagggcggggcgtaatttgatatcgagctcgcttggactcctgttgatagatccagtaatgacctcagaactccatctggatttgttcagaacgctcggttgccgccgggcgttttttattggtag

SEQ ID NO: 112 - DNA, 1876 bp, Artificial sequence
  Synthetic sequence
gcggccgctggtctcctctagataaaacgaaaggctcagtcgaaagactgggcctttcgttttacaattgggctaccttttttttgttttgtttgcaatggttaatctattgttaaaatttaaagtttcacttgaactttcaaataatgttcttatatttgcagtgtcgaaagaaacaaagtaggacttgagaccacctgcaggaaggccatcctgacggatggccttttttttagacggttatccacagaatcaggggataacgcaggaaagaacatgtgagcaaaaggccagcaaaaggccaggaaccgtaaaaaggccgcgttgctggcgtttttccataggctccgcccccctgacgagcatcacaaaaatcgacgctcaagtcagaggtggcgaaacccgacaggactataaagataccaggcgtttccccctggaagctccctcgtgcgctctcctgttccgaccctgccgcttaccggatacctgtccgcctttctcccttcgggaagcgtggcgctttctcatagctcacgctgtaggtatctcagttcggtgtaggtcgttcgctccaagctgggctgtgtgcacgaaccccccgttcagcccgaccgctgcgccttatccggtaactatcgtcttgagtccaacccggtaagacacgacttatcgccactggcagcagccactggtaacaggattagcagagcgaggtatgtaggcggtgctacagagttcttgaagtggtggcctaactacggctacactagaagaacagtatttggtatctgcgctctgctgaagccagttaccttcggaaaaagagttggtagctcttgatccggcaaacaaaccaccgctggtagcggtggtttttttgtttgcaagcagcagattacgcgcagaaaaaaaggatctcaagaagatcctttgatcttttctacggggtctgacgctcagtggaacgaaaactcacgttaagggattttggtcatgattgatcgggcacgtaagaggttccaactttcaccataatgaaataagatcactaccgggcgtattttttgagttatcgagattttcaggagctaaggaagctaaaatggagaaaaaaatcactggatataccaccgttgatatatcccaatggcatcgtaaagaacattttgaggcatttcagtcagttgctcaatgtacctataaccagaccgttcagctggatattacggcctttttaaagaccgtaaagaaaaataagcacaagttttatccggcctttattcacattcttgcccgcctgatgaatgctcatccggaatttcgtatggcaatgaaagacggtgagctggtgatatgggatagtgttcacccttgttacaccgttttccatgagcaaactgaaacgttttcatcgctctggagtgaataccacgacgatttccggcagtttctacacatatattcgcaagatgtggcgtgttacggtgaaaacctggcctatttccctaaagggtttattgagaatatgtttttcgtttcagccaatccctgggtgagtttcaccagttttgatttaaacgtggccaatatggacaacttcttcgcccccgttttcaccatgggcaaatattatacgcaaggcgacaaggtgctgatgccgctggcgattcaggttcatcatgccgtttgtgatggcttccatgtcggcagaatgcttaatgaattacaacagtactgcgatgagtggcagggcggggcgtaatttgatatcgagctcgcttggactcctgttgatagatccagtaatgacctcagaactccatctggatttgttcagaacgctcggttgccgccgggcgttttttattggtag

SEQ ID NO: 113 - DNA, 6329 bp, Artificial sequence
  Synthetic sequence
  misc_feature (528)..(536): n is a, c, g, or t
  misc_feature (548)..(548): n is a, c, g, or t
tctaggctacttttgcacccgctttccaagagaagaaagccttgataaattgacttagtgtaaaagcaagtgtctgcttaaccataagaacaaaaaaacttccgataaagtttggaagataaagctaaaagttcttatctttgcagtccgattcgcaaagaaaaggtgttacgcttttcttctttaccttctttccctttcgctaagagagcctgaaaaacgatagaaaaagaaaaacgaaaaaaaaacttccgaaaatatttggtagttaaaataaaacctcttacctttgcacccgcttttaaaacgaaagcaagatgttctttgaaatattgataaacaatacaagtagtacaagaaaaaaatagaaccgtcaatacttgtcttatatgtagtaatatgtatgagtcataaggtattaatgaagtcaataaattgtacggcatcctgaacagagcaaaaatcagctttatgctgactaacaatacttttacaatgaagagtttgatcctggctcaggactgatcnnnnnnnnnwwwaaawwtwanaataatgcgtaaaggcgaagagctgttcactggtgtcgtccctattctggtggaactggatggtgatgtcaacggtcataagttttccgtgcgtggcgagggtgaaggtgacgcaactaatggtaaactgacgctgaagttcatctgtactactggtaaactgccggttccttggccgactctggtaacgacgctgacttatggtgttcagtgctttgctcgttatccggaccatatgaagcagcatgacttcttcaagtccgccatgccggaaggctatgtgcaggaacgcacgatttcctttaaggatgacggcacgtacaaaacgcgtgcggaagtgaaatttgaaggcgataccctggtaaaccgcattgagctgaaaggcattgactttaaagaagacggcaatatcctgggccataagctggaatacaattttaacagccacaatgtttacatcaccgccgataaacaaaaaaatggcattaaagcgaattttaaaattcgccacaacgtggaggatggcagcgtgcagctggctgatcactaccagcaaaacactccaatcggtgatggtcctgttctgctgccagacaatcactatctgagcacgcaaagcgttctgtctaaagatccgaacgagaaacgcgatcatatggttctgctggagttcgtaaccgcagcgggcatcacgcatggtatggatgaactgtacaaaggatctgattacaaggacgatgatgataaggactacaaagatgatgatgacaaagattataaggacgatgatgataaaggtcatcatcatcatcatcactaaatcctagctgattagctcgagaaggccatcctgacggatggccttttttttgtatcgagacgactagtgtaattgcctatcttccagtgatggaacagcatttgtgcattggctgcaacaatcagccttacttgtgcctgttctatttccgaaccgaccgcttgtatgaatccatcaaaattcgttttctctatgttggattccttgttgctcatattgtgatgataatttctacaaatatagtcattggtaactatctatgaaactgtttgatacttttatagttgattaaacttgttcatggcatttgccttaatatcatccgctatgtcaatgtagggtttcatagctttgtagtcgctgtgtcccgtccatttcatgaccacctgtgccgggattccgagagccagcgcattgcagatgaatgtccttcttcctgcatgggtactgagcaaagcgtatttgggtgtgacttcatcaatacgttcatttcccttgtagtaggtttcccgtacaggctcgttgatttctgccagttcgcccagctctttcaggtaatcgttcatcttctggttgctgatgacgggcagagccatgtaattctcgaaatggatgtccttgtatttgtccagtatggctttgctgtatttgttcagttcaatcgtcaggctgtcggcagtcttgactgtggttatttcgatgtggtcggacttcacatcgcttcttttcagattgcgaacatccgaataccgcaaactcgtaaagcagcagaacaggaaaacatcacgcacacgttccaggtattgcttatccttgggtatctggtagtctttcagcttgttcagttcatcccaagtcaggaagattacttttttcgaggtggttttcagtttcggtttgaacgtatcgtatgcaatgttctgatgatgtcctttcttgaagctccagcgcaggaaccatttgaggaatcccatttgcttgccgatggtgctgtttctcatatccttggtgtcacgcaggaagttgacgtattcgttcaatccaaactcgttgaaatagttgaacgttgcatcctccttgaactctttgaggtggttcctcactgctgcaaatttttcataggtggatgccgtccagttattctggttaccgcactcttttacaaactcatcgaacacctcccaaaagctgacaggggcttcttccggctgttcttcgctggtgtctttcattctcatgttgaaagcttccttcaactgttgggtcgttggcatgacctcctgcacctcaaattccttgaaaatattctggatttcggcatagtatttcagcaagtccgtattgatttcggctgcactttgctttagcttgttggtacatccgctctttacccgctgcttatctgcatcccatttggctacgtcaatccggtagcccgttgtaaactcgatgcgttggctggcaaagatgacacgcatacggatgggtacgttctctacgattggcacaccgttctttttccggctctccaatgcaaaaatgatgttgcgcttgatattcataattgggtgcgtttgaaattctacacccaaatatacacccaattattgagatagcaaaagacatttagaaacatttacttttactctatattgtaatttacacttgattatcagtcgtttgcagtcttatgatattctgtgaaagtataagttcgagagcctgtctctccgcaaaaaacgctgaaaatcagcagattgcaaaacaaacaccctgttttacacccaagaatgtaaagtcggctgtttttgttttatttaagataatacaaccactacataataaaagagtagcgatattaaaagaatccgatgagaaaagactaatatttatctatccattcagtttgatttttcaggactttacatcgtcctgaaagtatttgttggtaccgaggacgcgacagctgcagacgcgttatgagtaaacttggtctgacagttaccaatgcttaatcagtgaggcacctatctcagcgatctgtctatttcgttcatccatagttgcctgactccccgtcgtgtagataactacgatacgggagggcttaccatctggccccagtgctgcaatgataccgcgggacccacgctcaccggctccagatttatcagcaataaaccagccagccggaagggccgagcgcagaagtggtcctgcaactttatccgcctccatccagtctattaattgttgccgggaagctagagtaagtagttcgccagttaatagtttgcgcaacgttgttgccattgctacaggcatcgtggtgtcacgctcgtcgtttggtatggcttcattcagctccggttcccaacgatcaaggcgagttacatgatcccccatgttgtgcaaaaaagcggttagctccttcggtcctccgatcgttgtcagaagtaagttggccgcagtgttatcactcatggttatggcagcactgcataattctcttactgtcatgccatccgtaagatgcttttctgtgactggtgagtactcaaccaagtcattctgagaatagtgtatgcggcgaccgagttgctcttgcccggcgtcaatacgggataataccgcgccacatagcagaactttaaaagtgctcatcattggaaaacgttcttcggggcgaaaactctcaaggatcttaccgctgttgagatccagttcgatgtaacccactcgtgcacccaactgatcttcagcatcttttactttcaccagcgtttctgggtgagcaaaaacaggaaggcaaaatgccgcaaaaaagggaataagggcgacacggaaatgttgaatactcatactcttcctttttcaatcatggccgcgggattaaaagtcggggattggtgaacaaaaaggtgtttctctctttaagagaaatatcgttttgctaaacagttgatattgaggtatcattttatcgtaaaagacatttttgctcaacaattgcttgacggaaatcaacaaattttagcattttgtaaaaaagtcgctatataatttggtgaattggagttattttcatatttttgcatcccgaagagtttctcttaaagagagaaacatcttttgcataccttttccgaccgaatttttatgtcgtaaagaggggctttgcagggggtggactcagaaagatgagaatagatgactattgtagttgaaacacatagaaagttgctgatatacagaccgatacgcatatcgggatgaaccatgagtacgttcttttctcaaaaaacataaatattcgaaaagagatgcaataaattaaggagaggttataatgaacaaagtaaatataaaagatagtcaaaattttattacttcaaaatatcacatagaaaaaataatgaattgcataagtttagatgaaaaagataacatctttgaaataggtgcagggaaaggtcattttactgctggattggtaaagagatgtaattttgtaacggcgatagaaattgattctaaattatgtgaggtaactcgtaataagctcttaaattatcctaactatcaaatagtaaatgatgatatactgaaatttacatttcctagccacaatccatataaaatatttggcagcataccttacaacataagcacaaatataattcgaaaaattgtttttgaaagttcagccacaataagttatttaatagtggaatatggttttgctaaaatgttattagatacaaacagatcactagcattgctgttaatggcagaggtagatatttctatattagcaaaaattcctaggtattatttccatccaaaacctaaagtggatagcacattaattgtattaaaaagaaagccagcaaaaatggcatttaaagagagaaaaaaatatgaaacttttgtaatgaaatgggttaacaaagagtacgaaaaactgtttacaaaaaatcaatttaataaagctttaaaacatgcgagaatatatgatataaacaatattagtttcgaacaatttgtatcgctatttaatagttataaaatatttaacggctaaaaacaataggccacatgcaactgtaaatgtttacgcgggtaccgacaccgcggtggaggggaattcccatgtcagccgttaagtgttcctgtgtcactcaaaattgctttgagaggctctaagggcttctcagtgcgttacatccctggcttgttgtccacaaccgttaaaccttaaaagctttaaaagccttatatattcttttttttcttataaaacttaaaaccttagaggctatttaagttgctgatttatattaattttattgttcaaacatgagagcttagtacgtgaaacatgagagcttagtacgttagccatgagagcttagtacgttagccatgagggtttagttcgttaaacatgagagcttagtacgttaaacatgagagcttagtacgtgaaacatgagagcttagtacgtactatcaacaggttgaactgctgatcttcagatcctctacgccggacgcatcgtggccggatcaattccgttttccgctgcataaccctgcttcggggtcattatagcgattttttcggtatatccatcctttttcgcacgatatacaggattttgccaaagggttcgtgtagactttccttggtgtatccaacggcgtcagccgggcaggataggtgaagtaggcccacccgcgagcgggtgttccttcttcactgtcccttattcgcacctggcggtgctcaacgggaatcctgctctgcgaggctggccggctaccgccggcgtaacagatgagggcaagcggatggctgatgaaaccaagccaaccaggaagggcagcccacctatcacggaattgatccccctcgaattggaattcgttccgtctcgattcagatctaaaggatccaa

SEQ ID NO: 114 - DNA, 6314 bp, Artificial sequence
  Synthetic sequence
  misc_feature (513)..(521): n is a, c, g, or t
  misc_feature (533)..(533): n is a, c, g, or t
tctactttccctggggtggctagcacaatgatggcttgccctgatatggaagtggaaggtaagattctgaaagcaatgaatgaagtgaagtcgttcgataaactttccggtggtggaatcggtttgtatgacgcaaataatgcgttggtgattgtacttgaaaagtaagatatacgtattatattaaataggtatgcctgtgtcgcacataacgatacaggcatattttttattcctttatgatctattcttttgctttattgaaccagagctgtttccatttgtttaatgagtcgatagctgtctggcttctatgtgacttgacagcagtcatttcgatttaaaactgtcgttttggcagaaaatatgtcacgtattcgtccgatttctttttggcacatggtttgttttttaatcagcgtccgtttgaaagcccttacaaagagaaagaaaacaaccggacaaaaagaaattgaataataataaataaaaagaataacgatcgactgatcnnnnnnnnnwwwaaawwtwanaataatgcgtaaaggcgaagagctgttcactggtgtcgtccctattctggtggaactggatggtgatgtcaacggtcataagttttccgtgcgtggcgagggtgaaggtgacgcaactaatggtaaactgacgctgaagttcatctgtactactggtaaactgccggttccttggccgactctggtaacgacgctgacttatggtgttcagtgctttgctcgttatccggaccatatgaagcagcatgacttcttcaagtccgccatgccggaaggctatgtgcaggaacgcacgatttcctttaaggatgacggcacgtacaaaacgcgtgcggaagtgaaatttgaaggcgataccctggtaaaccgcattgagctgaaaggcattgactttaaagaagacggcaatatcctgggccataagctggaatacaattttaacagccacaatgtttacatcaccgccgataaacaaaaaaatggcattaaagcgaattttaaaattcgccacaacgtggaggatggcagcgtgcagctggctgatcactaccagcaaaacactccaatcggtgatggtcctgttctgctgccagacaatcactatctgagcacgcaaagcgttctgtctaaagatccgaacgagaaacgcgatcatatggttctgctggagttcgtaaccgcagcgggcatcacgcatggtatggatgaactgtacaaaggatctgattacaaggacgatgatgataaggactacaaagatgatgatgacaaagattataaggacgatgatgataaaggtcatcatcatcatcatcactaaatcctagctgattagctcgagaaggccatcctgacggatggccttttttttgtatcgagacgactagtgtaattgcctatcttccagtgatggaacagcatttgtgcattggctgcaacaatcagccttacttgtgcctgttctatttccgaaccgaccgcttgtatgaatccatcaaaattcgttttctctatgttggattccttgttgctcatattgtgatgataatttctacaaatatagtcattggtaactatctatgaaactgtttgatacttttatagttgattaaacttgttcatggcatttgccttaatatcatccgctatgtcaatgtagggtttcatagctttgtagtcgctgtgtcccgtccatttcatgaccacctgtgccgggattccgagagccagcgcattgcagatgaatgtccttcttcctgcatgggtactgagcaaagcgtatttgggtgtgacttcatcaatacgttcatttcccttgtagtaggtttcccgtacaggctcgttgatttctgccagttcgcccagctctttcaggtaatcgttcatcttctggttgctgatgacgggcagagccatgtaattctcgaaatggatgtccttgtatttgtccagtatggctttgctgtatttgttcagttcaatcgtcaggctgtcggcagtcttgactgtggttatttcgatgtggtcggacttcacatcgcttcttttcagattgcgaacatccgaataccgcaaactcgtaaagcagcagaacaggaaaacatcacgcacacgttccaggtattgcttatccttgggtatctggtagtctttcagcttgttcagttcatcccaagtcaggaagattacttttttcgaggtggttttcagtttcggtttgaacgtatcgtatgcaatgttctgatgatgtcctttcttgaagctccagcgcaggaaccatttgaggaatcccatttgcttgccgatggtgctgtttctcatatccttggtgtcacgcaggaagttgacgtattcgttcaatccaaactcgttgaaatagttgaacgttgcatcctccttgaactctttgaggtggttcctcactgctgcaaatttttcataggtggatgccgtccagttattctggttaccgcactcttttacaaactcatcgaacacctcccaaaagctgacaggggcttcttccggctgttcttcgctggtgtctttcattctcatgttgaaagcttccttcaactgttgggtcgttggcatgacctcctgcacctcaaattccttgaaaatattctggatttcggcatagtatttcagcaagtccgtattgatttcggctgcactttgctttagcttgttggtacatccgctctttacccgctgcttatctgcatcccatttggctacgtcaatccggtagcccgttgtaaactcgatgcgttggctggcaaagatgacacgcatacggatgggtacgttctctacgattggcacaccgttctttttccggctctccaatgcaaaaatgatgttgcgcttgatattcataattgggtgcgtttgaaattctacacccaaatatacacccaattattgagatagcaaaagacatttagaaacatttacttttactctatattgtaatttacacttgattatcagtcgtttgcagtcttatgatattctgtgaaagtataagttcgagagcctgtctctccgcaaaaaacgctgaaaatcagcagattgcaaaacaaacaccctgttttacacccaagaatgtaaagtcggctgtttttgttttatttaagataatacaaccactacataataaaagagtagcgatattaaaagaatccgatgagaaaagactaatatttatctatccattcagtttgatttttcaggactttacatcgtcctgaaagtatttgttggtaccgaggacgcgacagctgcagacgcgttatgagtaaacttggtctgacagttaccaatgcttaatcagtgaggcacctatctcagcgatctgtctatttcgttcatccatagttgcctgactccccgtcgtgtagataactacgatacgggagggcttaccatctggccccagtgctgcaatgataccgcgggacccacgctcaccggctccagatttatcagcaataaaccagccagccggaagggccgagcgcagaagtggtcctgcaactttatccgcctccatccagtctattaattgttgccgggaagctagagtaagtagttcgccagttaatagtttgcgcaacgttgttgccattgctacaggcatcgtggtgtcacgctcgtcgtttggtatggcttcattcagctccggttcccaacgatcaaggcgagttacatgatcccccatgttgtgcaaaaaagcggttagctccttcggtcctccgatcgttgtcagaagtaagttggccgcagtgttatcactcatggttatggcagcactgcataattctcttactgtcatgccatccgtaagatgcttttctgtgactggtgagtactcaaccaagtcattctgagaatagtgtatgcggcgaccgagttgctcttgcccggcgtcaatacgggataataccgcgccacatagcagaactttaaaagtgctcatcattggaaaacgttcttcggggcgaaaactctcaaggatcttaccgctgttgagatccagttcgatgtaacccactcgtgcacccaactgatcttcagcatcttttactttcaccagcgtttctgggtgagcaaaaacaggaaggcaaaatgccgcaaaaaagggaataagggcgacacggaaatgttgaatactcatactcttcctttttcaatcatggccgcgggattaaaagtcggggattggtgaacaaaaaggtgtttctctctttaagagaaatatcgttttgctaaacagttgatattgaggtatcattttatcgtaaaagacatttttgctcaacaattgcttgacggaaatcaacaaattttagcattttgtaaaaaagtcgctatataatttggtgaattggagttattttcatatttttgcatcccgaagagtttctcttaaagagagaaacatcttttgcataccttttccgaccgaatttttatgtcgtaaagaggggctttgcagggggtggactcagaaagatgagaatagatgactattgtagttgaaacacatagaaagttgctgatatacagaccgatacgcatatcgggatgaaccatgagtacgttcttttctcaaaaaacataaatattcgaaaagagatgcaataaattaaggagaggttataatgaacaaagtaaatataaaagatagtcaaaattttattacttcaaaatatcacatagaaaaaataatgaattgcataagtttagatgaaaaagataacatctttgaaataggtgcagggaaaggtcattttactgctggattggtaaagagatgtaattttgtaacggcgatagaaattgattctaaattatgtgaggtaactcgtaataagctcttaaattatcctaactatcaaatagtaaatgatgatatactgaaatttacatttcctagccacaatccatataaaatatttggcagcataccttacaacataagcacaaatataattcgaaaaattgtttttgaaagttcagccacaataagttatttaatagtggaatatggttttgctaaaatgttattagatacaaacagatcactagcattgctgttaatggcagaggtagatatttctatattagcaaaaattcctaggtattatttccatccaaaacctaaagtggatagcacattaattgtattaaaaagaaagccagcaaaaatggcatttaaagagagaaaaaaatatgaaacttttgtaatgaaatgggttaacaaagagtacgaaaaactgtttacaaaaaatcaatttaataaagctttaaaacatgcgagaatatatgatataaacaatattagtttcgaacaatttgtatcgctatttaatagttataaaatatttaacggctaaaaacaataggccacatgcaactgtaaatgtttacgcgggtaccgacaccgcggtggaggggaattcccatgtcagccgttaagtgttcctgtgtcactcaaaattgctttgagaggctctaagggcttctcagtgcgttacatccctggcttgttgtccacaaccgttaaaccttaaaagctttaaaagccttatatattcttttttttcttataaaacttaaaaccttagaggctatttaagttgctgatttatattaattttattgttcaaacatgagagcttagtacgtgaaacatgagagcttagtacgttagccatgagagcttagtacgttagccatgagggtttagttcgttaaacatgagagcttagtacgttaaacatgagagcttagtacgtgaaacatgagagcttagtacgtactatcaacaggttgaactgctgatcttcagatcctctacgccggacgcatcgtggccggatcaattccgttttccgctgcataaccctgcttcggggtcattatagcgattttttcggtatatccatcctttttcgcacgatatacaggattttgccaaagggttcgtgtagactttccttggtgtatccaacggcgtcagccgggcaggataggtgaagtaggcccacccgcgagcgggtgttccttcttcactgtcccttattcgcacctggcggtgctcaacgggaatcctgctctgcgaggctggccggctaccgccggcgtaacagatgagggcaagcggatggctgatgaaaccaagccaaccaggaagggcagcccacctatcacggaattgatccccctcgaattggaattcgttccgtctcgattcagatctaaaggatccaa

SEQ ID NO: 115 - DNA, 6314 bp, Artificial sequence
  Synthetic sequence
  misc_feature (513)..(521): n is a, c, g, or t
  misc_feature (533)..(533): n is a, c, g, or t
tctattattctctacgttcaccccgttgaggtaggtgtccggacgtcccgtctccggattggggcggaaagtaatccggatatcccggattgcttctttcagcttctccgtatcgataacgtctccgttaaatatcccgttttcaatactatataaggtgactgcgcgatacattgccccactatctatataaatgtatcctacttcgcgggcgagatctttggccattgtactttttccgcaggaggaaaagccgtcgattgcgattgttatctttttcatattatctgcttcttatatttgtccgccaaagatacgcttattttgaaaatcagccatagatttgactgtaaaagcaactgaatgagtatgaaagaattaaaaaagttaaaaagccggataaaaagatacaaagaaacggacggttatctgaaaatgtagtatatttgcccagagacacataggaagacacttttttttattaatcattatattaacaaaattgactgatcnnnnnnnnnwwwaaawwtwanaataatgcgtaaaggcgaagagctgttcactggtgtcgtccctattctggtggaactggatggtgatgtcaacggtcataagttttccgtgcgtggcgagggtgaaggtgacgcaactaatggtaaactgacgctgaagttcatctgtactactggtaaactgccggttccttggccgactctggtaacgacgctgacttatggtgttcagtgctttgctcgttatccggaccatatgaagcagcatgacttcttcaagtccgccatgccggaaggctatgtgcaggaacgcacgatttcctttaaggatgacggcacgtacaaaacgcgtgcggaagtgaaatttgaaggcgataccctggtaaaccgcattgagctgaaaggcattgactttaaagaagacggcaatatcctgggccataagctggaatacaattttaacagccacaatgtttacatcaccgccgataaacaaaaaaatggcattaaagcgaattttaaaattcgccacaacgtggaggatggcagcgtgcagctggctgatcactaccagcaaaacactccaatcggtgatggtcctgttctgctgccagacaatcactatctgagcacgcaaagcgttctgtctaaagatccgaacgagaaacgcgatcatatggttctgctggagttcgtaaccgcagcgggcatcacgcatggtatggatgaactgtacaaaggatctgattacaaggacgatgatgataaggactacaaagatgatgatgacaaagattataaggacgatgatgataaaggtcatcatcatcatcatcactaaatcctagctgattagctcgagaaggccatcctgacggatggccttttttttgtatcgagacgactagtgtaattgcctatcttccagtgatggaacagcatttgtgcattggctgcaacaatcagccttacttgtgcctgttctatttccgaaccgaccgcttgtatgaatccatcaaaattcgttttctctatgttggattccttgttgctcatattgtgatgataatttctacaaatatagtcattggtaactatctatgaaactgtttgatacttttatagttgattaaacttgttcatggcatttgccttaatatcatccgctatgtcaatgtagggtttcatagctttgtagtcgctgtgtcccgtccatttcatgaccacctgtgccgggattccgagagccagcgcattgcagatgaatgtccttcttcctgcatgggtactgagcaaagcgtatttgggtgtgacttcatcaatacgttcatttcccttgtagtaggtttcccgtacaggctcgttgatttctgccagttcgcccagctctttcaggtaatcgttcatcttctggttgctgatgacgggcagagccatgtaattctcgaaatggatgtccttgtatttgtccagtatggctttgctgtatttgttcagttcaatcgtcaggctgtcggcagtcttgactgtggttatttcgatgtggtcggacttcacatcgcttcttttcagattgcgaacatccgaataccgcaaactcgtaaagcagcagaacaggaaaacatcacgcacacgttccaggtattgcttatccttgggtatctggtagtctttcagcttgttcagttcatcccaagtcaggaagattacttttttcgaggtggttttcagtttcggtttgaacgtatcgtatgcaatgttctgatgatgtcctttcttgaagctccagcgcaggaaccatttgaggaatcccatttgcttgccgatggtgctgtttctcatatccttggtgtcacgcaggaagttgacgtattcgttcaatccaaactcgttgaaatagttgaacgttgcatcctccttgaactctttgaggtggttcctcactgctgcaaatttttcataggtggatgccgtccagttattctggttaccgcactcttttacaaactcatcgaacacctcccaaaagctgacaggggcttcttccggctgttcttcgctggtgtctttcattctcatgttgaaagcttccttcaactgttgggtcgttggcatgacctcctgcacctcaaattccttgaaaatattctggatttcggcatagtatttcagcaagtccgtattgatttcggctgcactttgctttagcttgttggtacatccgctctttacccgctgcttatctgcatcccatttggctacgtcaatccggtagcccgttgtaaactcgatgcgttggctggcaaagatgacacgcatacggatgggtacgttctctacgattggcacaccgttctttttccggctctccaatgcaaaaatgatgttgcgcttgatattcataattgggtgcgtttgaaattctacacccaaatatacacccaattattgagatagcaaaagacatttagaaacatttacttttactctatattgtaatttacacttgattatcagtcgtttgcagtcttatgatattctgtgaaagtataagttcgagagcctgtctctccgcaaaaaacgctgaaaatcagcagattgcaaaacaaacaccctgttttacacccaagaatgtaaagtcggctgtttttgttttatttaagataatacaaccactacataataaaagagtagcgatattaaaagaatccgatgagaaaagactaatatttatctatccattcagtttgatttttcaggactttacatcgtcctgaaagtatttgttggtaccgaggacgcgacagctgcagacgcgttatgagtaaacttggtctgacagttaccaatgcttaatcagtgaggcacctatctcagcgatctgtctatttcgttcatccatagttgcctgactccccgtcgtgtagataactacgatacgggagggcttaccatctggccccagtgctgcaatgataccgcgggacccacgctcaccggctccagatttatcagcaataaaccagccagccggaagggccgagcgcagaagtggtcctgcaactttatccgcctccatccagtctattaattgttgccgggaagctagagtaagtagttcgccagttaatagtttgcgcaacgttgttgccattgctacaggcatcgtggtgtcacgctcgtcgtttggtatggcttcattcagctccggttcccaacgatcaaggcgagttacatgatcccccatgttgtgcaaaaaagcggttagctccttcggtcctccgatcgttgtcagaagtaagttggccgcagtgttatcactcatggttatggcagcactgcataattctcttactgtcatgccatccgtaagatgcttttctgtgactggtgagtactcaaccaagtcattctgagaatagtgtatgcggcgaccgagttgctcttgcccggcgtcaatacgggataataccgcgccacatagcagaactttaaaagtgctcatcattggaaaacgttcttcggggcgaaaactctcaaggatcttaccgctgttgagatccagttcgatgtaacccactcgtgcacccaactgatcttcagcatcttttactttcaccagcgtttctgggtgagcaaaaacaggaaggcaaaatgccgcaaaaaagggaataagggcgacacggaaatgttgaatactcatactcttcctttttcaatcatggccgcgggattaaaagtcggggattggtgaacaaaaaggtgtttctctctttaagagaaatatcgttttgctaaacagttgatattgaggtatcattttatcgtaaaagacatttttgctcaacaattgcttgacggaaatcaacaaattttagcattttgtaaaaaagtcgctatataatttggtgaattggagttattttcatatttttgcatcccgaagagtttctcttaaagagagaaacatcttttgcataccttttccgaccgaatttttatgtcgtaaagaggggctttgcagggggtggactcagaaagatgagaatagatgactattgtagttgaaacacatagaaagttgctgatatacagaccgatacgcatatcgggatgaaccatgagtacgttcttttctcaaaaaacataaatattcgaaaagagatgcaataaattaaggagaggttataatgaacaaagtaaatataaaagatagtcaaaattttattacttcaaaatatcacatagaaaaaataatgaattgcataagtttagatgaaaaagataacatctttgaaataggtgcagggaaaggtcattttactgctggattggtaaagagatgtaattttgtaacggcgatagaaattgattctaaattatgtgaggtaactcgtaataagctcttaaattatcctaactatcaaatagtaaatgatgatatactgaaatttacatttcctagccacaatccatataaaatatttggcagcataccttacaacataagcacaaatataattcgaaaaattgtttttgaaagttcagccacaataagttatttaatagtggaatatggttttgctaaaatgttattagatacaaacagatcactagcattgctgttaatggcagaggtagatatttctatattagcaaaaattcctaggtattatttccatccaaaacctaaagtggatagcacattaattgtattaaaaagaaagccagcaaaaatggcatttaaagagagaaaaaaatatgaaacttttgtaatgaaatgggttaacaaagagtacgaaaaactgtttacaaaaaatcaatttaataaagctttaaaacatgcgagaatatatgatataaacaatattagtttcgaacaatttgtatcgctatttaatagttataaaatatttaacggctaaaaacaataggccacatgcaactgtaaatgtttacgcgggtaccgacaccgcggtggaggggaattcccatgtcagccgttaagtgttcctgtgtcactcaaaattgctttgagaggctctaagggcttctcagtgcgttacatccctggcttgttgtccacaaccgttaaaccttaaaagctttaaaagccttatatattcttttttttcttataaaacttaaaaccttagaggctatttaagttgctgatttatattaattttattgttcaaacatgagagcttagtacgtgaaacatgagagcttagtacgttagccatgagagcttagtacgttagccatgagggtttagttcgttaaacatgagagcttagtacgttaaacatgagagcttagtacgtgaaacatgagagcttagtacgtactatcaacaggttgaactgctgatcttcagatcctctacgccggacgcatcgtggccggatcaattccgttttccgctgcataaccctgcttcggggtcattatagcgattttttcggtatatccatcctttttcgcacgatatacaggattttgccaaagggttcgtgtagactttccttggtgtatccaacggcgtcagccgggcaggataggtgaagtaggcccacccgcgagcgggtgttccttcttcactgtcccttattcgcacctggcggtgctcaacgggaatcctgctctgcgaggctggccggctaccgccggcgtaacagatgagggcaagcggatggctgatgaaaccaagccaaccaggaagggcagcccacctatcacggaattgatccccctcgaattggaattcgttccgtctcgattcagatctaaaggatccaa

SEQ ID NO: 116 - DNA, 6314 bp, Artificial sequence
  Synthetic sequence
  misc_feature (513)..(521): n is a, c, g, or t
  misc_feature (533)..(533): n is a, c, g, or t
tctatatctttataaggatatgtatcttccagcgtgtacttatcatacagcagctctttggtgatttgaatttcttccggagtaatctttttgacgacaggttctgccacagtttccgcaattgtatcctgtgccagcgaatcgacctgcaaagtttcatcagaagatttttgtcctgtacgtgaagtgcaggaacagagtacgcaaaaagcgatggatatgccaaaacttattttattcatataatctatacagttcatcttggggttcgtttacgaatatacgttattataaggaataatccgcttctattgtttaaaaagtgtggaacaaatatgcttttttgccattaataacctgttgtcagtcattttgtcagtcaatttctgccaaacaatcattattttgctttggcatacttttcgcaactgatttagcgtcttcttcaagaagaggacaaatcatgaatataatgtataacaaataaaatcaaaaaaaagaactgactgatcnnnnnnnnnwwwaaawwtwanaataatgcgtaaaggcgaagagctgttcactggtgtcgtccctattctggtggaactggatggtgatgtcaacggtcataagttttccgtgcgtggcgagggtgaaggtgacgcaactaatggtaaactgacgctgaagttcatctgtactactggtaaactgccggttccttggccgactctggtaacgacgctgacttatggtgttcagtgctttgctcgttatccggaccatatgaagcagcatgacttcttcaagtccgccatgccggaaggctatgtgcaggaacgcacgatttcctttaaggatgacggcacgtacaaaacgcgtgcggaagtgaaatttgaaggcgataccctggtaaaccgcattgagctgaaaggcattgactttaaagaagacggcaatatcctgggccataagctggaatacaattttaacagccacaatgtttacatcaccgccgataaacaaaaaaatggcattaaagcgaattttaaaattcgccacaacgtggaggatggcagcgtgcagctggctgatcactaccagcaaaacactccaatcggtgatggtcctgttctgctgccagacaatcactatctgagcacgcaaagcgttctgtctaaagatccgaacgagaaacgcgatcatatggttctgctggagttcgtaaccgcagcgggcatcacgcatggtatggatgaactgtacaaaggatctgattacaaggacgatgatgataaggactacaaagatgatgatgacaaagattataaggacgatgatgataaaggtcatcatcatcatcatcactaaatcctagctgattagctcgagaaggccatcctgacggatggccttttttttgtatcgagacgactagtgtaattgcctatcttccagtgatggaacagcatttgtgcattggctgcaacaatcagccttacttgtgcctgttctatttccgaaccgaccgcttgtatgaatccatcaaaattcgttttctctatgttggattccttgttgctcatattgtgatgataatttctacaaatatagtcattggtaactatctatgaaactgtttgatacttttatagttgattaaacttgttcatggcatttgccttaatatcatccgctatgtcaatgtagggtttcatagctttgtagtcgctgtgtcccgtccatttcatgaccacctgtgccgggattccgagagccagcgcattgcagatgaatgtccttcttcctgcatgggtactgagcaaagcgtatttgggtgtgacttcatcaatacgttcatttcccttgtagtaggtttcccgtacaggctcgttgatttctgccagttcgcccagctctttcaggtaatcgttcatcttctggttgctgatgacgggcagagccatgtaattctcgaaatggatgtccttgtatttgtccagtatggctttgctgtatttgttcagttcaatcgtcaggctgtcggcagtcttgactgtggttatttcgatgtggtcggacttcacatcgcttcttttcagattgcgaacatccgaataccgcaaactcgtaaagcagcagaacaggaaaacatcacgcacacgttccaggtattgcttatccttgggtatctggtagtctttcagcttgttcagttcatcccaagtcaggaagattacttttttcgaggtggttttcagtttcggtttgaacgtatcgtatgcaatgttctgatgatgtcctttcttgaagctccagcgcaggaaccatttgaggaatcccatttgcttgccgatggtgctgtttctcatatccttggtgtcacgcaggaagttgacgtattcgttcaatccaaactcgttgaaatagttgaacgttgcatcctccttgaactctttgaggtggttcctcactgctgcaaatttttcataggtggatgccgtccagttattctggttaccgcactcttttacaaactcatcgaacacctcccaaaagctgacaggggcttcttccggctgttcttcgctggtgtctttcattctcatgttgaaagcttccttcaactgttgggtcgttggcatgacctcctgcacctcaaattccttgaaaatattctggatttcggcatagtatttcagcaagtccgtattgatttcggctgcactttgctttagcttgttggtacatccgctctttacccgctgcttatctgcatcccatttggctacgtcaatccggtagcccgttgtaaactcgatgcgttggctggcaaagatgacacgcatacggatgggtacgttctctacgattggcacaccgttctttttccggctctccaatgcaaaaatgatgttgcgcttgatattcataattgggtgcgtttgaaattctacacccaaatatacacccaattattgagatagcaaaagacatttagaaacatttacttttactctatattgtaatttacacttgattatcagtcgtttgcagtcttatgatattctgtgaaagtataagttcgagagcctgtctctccgcaaaaaacgctgaaaatcagcagattgcaaaacaaacaccctgttttacacccaagaatgtaaagtcggctgtttttgttttatttaagataatacaaccactacataataaaagagtagcgatattaaaagaatccgatgagaaaagactaatatttatctatccattcagtttgatttttcaggactttacatcgtcctgaaagtatttgttggtaccgaggacgcgacagctgcagacgcgttatgagtaaacttggtctgacagttaccaatgcttaatcagtgaggcacctatctcagcgatctgtctatttcgttcatccatagttgcctgactccccgtcgtgtagataactacgatacgggagggcttaccatctggccccagtgctgcaatgataccgcgggacccacgctcaccggctccagatttatcagcaataaaccagccagccggaagggccgagcgcagaagtggtcctgcaactttatccgcctccatccagtctattaattgttgccgggaagctagagtaagtagttcgccagttaatagtttgcgcaacgttgttgccattgctacaggcatcgtggtgtcacgctcgtcgtttggtatggcttcattcagctccggttcccaacgatcaaggcgagttacatgatcccccatgttgtgcaaaaaagcggttagctccttcggtcctccgatcgttgtcagaagtaagttggccgcagtgttatcactcatggttatggcagcactgcataattctcttactgtcatgccatccgtaagatgcttttctgtgactggtgagtactcaaccaagtcattctgagaatagtgtatgcggcgaccgagttgctcttgcccggcgtcaatacgggataataccgcgccacatagcagaactttaaaagtgctcatcattggaaaacgttcttcggggcgaaaactctcaaggatcttaccgctgttgagatccagttcgatgtaacccactcgtgcacccaactgatcttcagcatcttttactttcaccagcgtttctgggtgagcaaaaacaggaaggcaaaatgccgcaaaaaagggaataagggcgacacggaaatgttgaatactcatactcttcctttttcaatcatggccgcgggattaaaagtcggggattggtgaacaaaaaggtgtttctctctttaagagaaatatcgttttgctaaacagttgatattgaggtatcattttatcgtaaaagacatttttgctcaacaattgcttgacggaaatcaacaaattttagcattttgtaaaaaagtcgctatataatttggtgaattggagttattttcatatttttgcatcccgaagagtttctcttaaagagagaaacatcttttgcataccttttccgaccgaatttttatgtcgtaaagaggggctttgcagggggtggactcagaaagatgagaatagatgactattgtagttgaaacacatagaaagttgctgatatacagaccgatacgcatatcgggatgaaccatgagtacgttcttttctcaaaaaacataaatattcgaaaagagatgcaataaattaaggagaggttataatgaacaaagtaaatataaaagatagtcaaaattttattacttcaaaatatcacatagaaaaaataatgaattgcataagtttagatgaaaaagataacatctttgaaataggtgcagggaaaggtcattttactgctggattggtaaagagatgtaattttgtaacggcgatagaaattgattctaaattatgtgaggtaactcgtaataagctcttaaattatcctaactatcaaatagtaaatgatgatatactgaaatttacatttcctagccacaatccatataaaatatttggcagcataccttacaacataagcacaaatataattcgaaaaattgtttttgaaagttcagccacaataagttatttaatagtggaatatggttttgctaaaatgttattagatacaaacagatcactagcattgctgttaatggcagaggtagatatttctatattagcaaaaattcctaggtattatttccatccaaaacctaaagtggatagcacattaattgtattaaaaagaaagccagcaaaaatggcatttaaagagagaaaaaaatatgaaacttttgtaatgaaatgggttaacaaagagtacgaaaaactgtttacaaaaaatcaatttaataaagctttaaaacatgcgagaatatatgatataaacaatattagtttcgaacaatttgtatcgctatttaatagttataaaatatttaacggctaaaaacaataggccacatgcaactgtaaatgtttacgcgggtaccgacaccgcggtggaggggaattcccatgtcagccgttaagtgttcctgtgtcactcaaaattgctttgagaggctctaagggcttctcagtgcgttacatccctggcttgttgtccacaaccgttaaaccttaaaagctttaaaagccttatatattcttttttttcttataaaacttaaaaccttagaggctatttaagttgctgatttatattaattttattgttcaaacatgagagcttagtacgtgaaacatgagagcttagtacgttagccatgagagcttagtacgttagccatgagggtttagttcgttaaacatgagagcttagtacgttaaacatgagagcttagtacgtgaaacatgagagcttagtacgtactatcaacaggttgaactgctgatcttcagatcctctacgccggacgcatcgtggccggatcaattccgttttccgctgcataaccctgcttcggggtcattatagcgattttttcggtatatccatcctttttcgcacgatatacaggattttgccaaagggttcgtgtagactttccttggtgtatccaacggcgtcagccgggcaggataggtgaagtaggcccacccgcgagcgggtgttccttcttcactgtcccttattcgcacctggcggtgctcaacgggaatcctgctctgcgaggctggccggctaccgccggcgtaacagatgagggcaagcggatggctgatgaaaccaagccaaccaggaagggcagcccacctatcacggaattgatccccctcgaattggaattcgttccgtctcgattcagatctaaaggatccaa

SEQ ID NO: 117 - DNA, 6314 bp, Artificial sequence
  Synthetic sequence
  misc_feature (513)..(521): n is a, c, g, or t
  misc_feature (533)..(533): n is a, c, g, or t
tctactgatgtcgggtgaaacagcagcgccagagattggtaatactcttccccttcagaacattccggttggtactgtaattcacaatattgagttacgtccgggacagggtgctgctctggttagatcagctggaaactttgctcagttaacttctcgtgagggtaagtattgtgtgattaaattgccttcaggtgaagtaagacagattcttagcacttgtaaagctactatcggtagtgttggtaactcagatcatggattggaacgctcaggtaaggctggacgctctcgttggcaaggtcgtcgtcctcgtaaccgtggtgttgtaatgaacccggttgatcacccgatgggtggtggtgaaggacgttcttccggaggacatccaagatctcgtaagggattgtacgctaagggacttaagactagagctcctaagaaacaatcgtctaagtacattattgagagaagaaaaaagtaatctgattaattgagtaaactgactgatcnnnnnnnnnwwwaaawwtwanaataatgcgtaaaggcgaagagctgttcactggtgtcgtccctattctggtggaactggatggtgatgtcaacggtcataagttttccgtgcgtggcgagggtgaaggtgacgcaactaatggtaaactgacgctgaagttcatctgtactactggtaaactgccggttccttggccgactctggtaacgacgctgacttatggtgttcagtgctttgctcgttatccggaccatatgaagcagcatgacttcttcaagtccgccatgccggaaggctatgtgcaggaacgcacgatttcctttaaggatgacggcacgtacaaaacgcgtgcggaagtgaaatttgaaggcgataccctggtaaaccgcattgagctgaaaggcattgactttaaagaagacggcaatatcctgggccataagctggaatacaattttaacagccacaatgtttacatcaccgccgataaacaaaaaaatggcattaaagcgaattttaaaattcgccacaacgtggaggatggcagcgtgcagctggctgatcactaccagcaaaacactccaatcggtgatggtcctgttctgctgccagacaatcactatctgagcacgcaaagcgttctgtctaaagatccgaacgagaaacgcgatcatatggttctgctggagttcgtaaccgcagcgggcatcacgcatggtatggatgaactgtacaaaggatctgattacaaggacgatgatgataaggactacaaagatgatgatgacaaagattataaggacgatgatgataaaggtcatcatcatcatcatcactaaatcctagctgattagctcgagaaggccatcctgacggatggccttttttttgtatcgagacgactagtgtaattgcctatcttccagtgatggaacagcatttgtgcattggctgcaacaatcagccttacttgtgcctgttctatttccgaaccgaccgcttgtatgaatccatcaaaattcgttttctctatgttggattccttgttgctcatattgtgatgataatttctacaaatatagtcattggtaactatctatgaaactgtttgatacttttatagttgattaaacttgttcatggcatttgccttaatatcatccgctatgtcaatgtagggtttcatagctttgtagtcgctgtgtcccgtccatttcatgaccacctgtgccgggattccgagagccagcgcattgcagatgaatgtccttcttcctgcatgggtactgagcaaagcgtatttgggtgtgacttcatcaatacgttcatttcccttgtagtaggtttcccgtacaggctcgttgatttctgccagttcgcccagctctttcaggtaatcgttcatcttctggttgctgatgacgggcagagccatgtaattctcgaaatggatgtccttgtatttgtccagtatggctttgctgtatttgttcagttcaatcgtcaggctgtcggcagtcttgactgtggttatttcgatgtggtcggacttcacatcgcttcttttcagattgcgaacatccgaataccgcaaactcgtaaagcagcagaacaggaaaacatcacgcacacgttccaggtattgcttatccttgggtatctggtagtctttcagcttgttcagttcatcccaagtcaggaagattacttttttcgaggtggttttcagtttcggtttgaacgtatcgtatgcaatgttctgatgatgtcctttcttgaagctccagcgcaggaaccatttgaggaatcccatttgcttgccgatggtgctgtttctcatatccttggtgtcacgcaggaagttgacgtattcgttcaatccaaactcgttgaaatagttgaacgttgcatcctccttgaactctttgaggtggttcctcactgctgcaaatttttcataggtggatgccgtccagttattctggttaccgcactcttttacaaactcatcgaacacctcccaaaagctgacaggggcttcttccggctgttcttcgctggtgtctttcattctcatgttgaaagcttccttcaactgttgggtcgttggcatgacctcctgcacctcaaattccttgaaaatattctggatttcggcatagtatttcagcaagtccgtattgatttcggctgcactttgctttagcttgttggtacatccgctctttacccgctgcttatctgcatcccatttggctacgtcaatccggtagcccgttgtaaactcgatgcgttggctggcaaagatgacacgcatacggatgggtacgttctctacgattggcacaccgttctttttccggctctccaatgcaaaaatgatgttgcgcttgatattcataattgggtgcgtttgaaattctacacccaaatatacacccaattattgagatagcaaaagacatttagaaacatttacttttactctatattgtaatttacacttgattatcagtcgtttgcagtcttatgatattctgtgaaagtataagttcgagagcctgtctctccgcaaaaaacgctgaaaatcagcagattgcaaaacaaacaccctgttttacacccaagaatgtaaagtcggctgtttttgttttatttaagataatacaaccactacataataaaagagtagcgatattaaaagaatccgatgagaaaagactaatatttatctatccattcagtttgatttttcaggactttacatcgtcctgaaagtatttgttggtaccgaggacgcgacagctgcagacgcgttatgagtaaacttggtctgacagttaccaatgcttaatcagtgaggcacctatctcagcgatctgtctatttcgttcatccatagttgcctgactccccgtcgtgtagataactacgatacgggagggcttaccatctggccccagtgctgcaatgataccgcgggacccacgctcaccggctccagatttatcagcaataaaccagccagccggaagggccgagcgcagaagtggtcctgcaactttatccgcctccatccagtctattaattgttgccgggaagctagagtaagtagttcgccagttaatagtttgcgcaacgttgttgccattgctacaggcatcgtggtgtcacgctcgtcgtttggtatggcttcattcagctccggttcccaacgatcaaggcgagttacatgatcccccatgttgtgcaaaaaagcggttagctccttcggtcctccgatcgttgtcagaagtaagttggccgcagtgttatcactcatggttatggcagcactgcataattctcttactgtcatgccatccgtaagatgcttttctgtgactggtgagtactcaaccaagtcattctgagaatagtgtatgcggcgaccgagttgctcttgcccggcgtcaatacgggataataccgcgccacatagcagaactttaaaagtgctcatcattggaaaacgttcttcggggcgaaaactctcaaggatcttaccgctgttgagatccagttcgatgtaacccactcgtgcacccaactgatcttcagcatcttttactttcaccagcgtttctgggtgagcaaaaacaggaaggcaaaatgccgcaaaaaagggaataagggcgacacggaaatgttgaatactcatactcttcctttttcaatcatggccgcgggattaaaagtcggggattggtgaacaaaaaggtgtttctctctttaagagaaatatcgttttgctaaacagttgatattgaggtatcattttatcgtaaaagacatttttgctcaacaattgcttgacggaaatcaacaaattttagcattttgtaaaaaagtcgctatataatttggtgaattggagttattttcatatttttgcatcccgaagagtttctcttaaagagagaaacatcttttgcataccttttccgaccgaatttttatgtcgtaaagaggggctttgcagggggtggactcagaaagatgagaatagatgactattgtagttgaaacacatagaaagttgctgatatacagaccgatacgcatatcgggatgaaccatgagtacgttcttttctcaaaaaacataaatattcgaaaagagatgcaataaattaaggagaggttataatgaacaaagtaaatataaaagatagtcaaaattttattacttcaaaatatcacatagaaaaaataatgaattgcataagtttagatgaaaaagataacatctttgaaataggtgcagggaaaggtcattttactgctggattggtaaagagatgtaattttgtaacggcgatagaaattgattctaaattatgtgaggtaactcgtaataagctcttaaattatcctaactatcaaatagtaaatgatgatatactgaaatttacatttcctagccacaatccatataaaatatttggcagcataccttacaacataagcacaaatataattcgaaaaattgtttttgaaagttcagccacaataagttatttaatagtggaatatggttttgctaaaatgttattagatacaaacagatcactagcattgctgttaatggcagaggtagatatttctatattagcaaaaattcctaggtattatttccatccaaaacctaaagtggatagcacattaattgtattaaaaagaaagccagcaaaaatggcatttaaagagagaaaaaaatatgaaacttttgtaatgaaatgggttaacaaagagtacgaaaaactgtttacaaaaaatcaatttaataaagctttaaaacatgcgagaatatatgatataaacaatattagtttcgaacaatttgtatcgctatttaatagttataaaatatttaacggctaaaaacaataggccacatgcaactgtaaatgtttacgcgggtaccgacaccgcggtggaggggaattcccatgtcagccgttaagtgttcctgtgtcactcaaaattgctttgagaggctctaagggcttctcagtgcgttacatccctggcttgttgtccacaaccgttaaaccttaaaagctttaaaagccttatatattcttttttttcttataaaacttaaaaccttagaggctatttaagttgctgatttatattaattttattgttcaaacatgagagcttagtacgtgaaacatgagagcttagtacgttagccatgagagcttagtacgttagccatgagggtttagttcgttaaacatgagagcttagtacgttaaacatgagagcttagtacgtgaaacatgagagcttagtacgtactatcaacaggttgaactgctgatcttcagatcctctacgccggacgcatcgtggccggatcaattccgttttccgctgcataaccctgcttcggggtcattatagcgattttttcggtatatccatcctttttcgcacgatatacaggattttgccaaagggttcgtgtagactttccttggtgtatccaacggcgtcagccgggcaggataggtgaagtaggcccacccgcgagcgggtgttccttcttcactgtcccttattcgcacctggcggtgctcaacgggaatcctgctctgcgaggctggccggctaccgccggcgtaacagatgagggcaagcggatggctgatgaaaccaagccaaccaggaagggcagcccacctatcacggaattgatccccctcgaattggaattcgttccgtctcgattcagatctaaaggatccaa

SEQ ID NO: 118 - DNA, 6064 bp, Artificial sequence
  Synthetic sequence
  misc_feature (263)..(271): n is a, c, g, or t
  misc_feature (283)..(283): n is a, c, g, or t
tctaatccatctttgcccacaatcagagtgacaactttggcaagaatgcggaagtagctcagttgatagagcattagccttccaagctgagggtcgcgggtttgagccccgtcttccgctcttttttttcttgctgttatagctcagcggtagagcacttccttggtaaggaagaggtcccgggttcaagtcccggtaacagctcataaagatgtaaatgctgattattaatcaaataaataacaagtaaagctgactgatcnnnnnnnnnwwwaaawwtwanaataatgcgtaaaggcgaagagctgttcactggtgtcgtccctattctggtggaactggatggtgatgtcaacggtcataagttttccgtgcgtggcgagggtgaaggtgacgcaactaatggtaaactgacgctgaagttcatctgtactactggtaaactgccggttccttggccgactctggtaacgacgctgacttatggtgttcagtgctttgctcgttatccggaccatatgaagcagcatgacttcttcaagtccgccatgccggaaggctatgtgcaggaacgcacgatttcctttaaggatgacggcacgtacaaaacgcgtgcggaagtgaaatttgaaggcgataccctggtaaaccgcattgagctgaaaggcattgactttaaagaagacggcaatatcctgggccataagctggaatacaattttaacagccacaatgtttacatcaccgccgataaacaaaaaaatggcattaaagcgaattttaaaattcgccacaacgtggaggatggcagcgtgcagctggctgatcactaccagcaaaacactccaatcggtgatggtcctgttctgctgccagacaatcactatctgagcacgcaaagcgttctgtctaaagatccgaacgagaaacgcgatcatatggttctgctggagttcgtaaccgcagcgggcatcacgcatggtatggatgaactgtacaaaggatctgattacaaggacgatgatgataaggactacaaagatgatgatgacaaagattataaggacgatgatgataaaggtcatcatcatcatcatcactaaatcctagctgattagctcgagaaggccatcctgacggatggccttttttttgtatcgagacgactagtgtaattgcctatcttccagtgatggaacagcatttgtgcattggctgcaacaatcagccttacttgtgcctgttctatttccgaaccgaccgcttgtatgaatccatcaaaattcgttttctctatgttggattccttgttgctcatattgtgatgataatttctacaaatatagtcattggtaactatctatgaaactgtttgatacttttatagttgattaaacttgttcatggcatttgccttaatatcatccgctatgtcaatgtagggtttcatagctttgtagtcgctgtgtcccgtccatttcatgaccacctgtgccgggattccgagagccagcgcattgcagatgaatgtccttcttcctgcatgggtactgagcaaagcgtatttgggtgtgacttcatcaatacgttcatttcccttgtagtaggtttcccgtacaggctcgttgatttctgccagttcgcccagctctttcaggtaatcgttcatcttctggttgctgatgacgggcagagccatgtaattctcgaaatggatgtccttgtatttgtccagtatggctttgctgtatttgttcagttcaatcgtcaggctgtcggcagtcttgactgtggttatttcgatgtggtcggacttcacatcgcttcttttcagattgcgaacatccgaataccgcaaactcgtaaagcagcagaacaggaaaacatcacgcacacgttccaggtattgcttatccttgggtatctggtagtctttcagcttgttcagttcatcccaagtcaggaagattacttttttcgaggtggttttcagtttcggtttgaacgtatcgtatgcaatgttctgatgatgtcctttcttgaagctccagcgcaggaaccatttgaggaatcccatttgcttgccgatggtgctgtttctcatatccttggtgtcacgcaggaagttgacgtattcgttcaatccaaactcgttgaaatagttgaacgttgcatcctccttgaactctttgaggtggttcctcactgctgcaaatttttcataggtggatgccgtccagttattctggttaccgcactcttttacaaactcatcgaacacctcccaaaagctgacaggggcttcttccggctgttcttcgctggtgtctttcattctcatgttgaaagcttccttcaactgttgggtcgttggcatgacctcctgcacctcaaattccttgaaaatattctggatttcggcatagtatttcagcaagtccgtattgatttcggctgcactttgctttagcttgttggtacatccgctctttacccgctgcttatctgcatcccatttggctacgtcaatccggtagcccgttgtaaactcgatgcgttggctggcaaagatgacacgcatacggatgggtacgttctctacgattggcacaccgttctttttccggctctccaatgcaaaaatgatgttgcgcttgatattcataattgggtgcgtttgaaattctacacccaaatatacacccaattattgagatagcaaaagacatttagaaacatttacttttactctatattgtaatttacacttgattatcagtcgtttgcagtcttatgatattctgtgaaagtataagttcgagagcctgtctctccgcaaaaaacgctgaaaatcagcagattgcaaaacaaacaccctgttttacacccaagaatgtaaagtcggctgtttttgttttatttaagataatacaaccactacataataaaagagtagcgatattaaaagaatccgatgagaaaagactaatatttatctatccattcagtttgatttttcaggactttacatcgtcctgaaagtatttgttggtaccgaggacgcgacagctgcagacgcgttatgagtaaacttggtctgacagttaccaatgcttaatcagtgaggcacctatctcagcgatctgtctatttcgttcatccatagttgcctgactccccgtcgtgtagataactacgatacgggagggcttaccatctggccccagtgctgcaatgataccgcgggacccacgctcaccggctccagatttatcagcaataaaccagccagccggaagggccgagcgcagaagtggtcctgcaactttatccgcctccatccagtctattaattgttgccgggaagctagagtaagtagttcgccagttaatagtttgcgcaacgttgttgccattgctacaggcatcgtggtgtcacgctcgtcgtttggtatggcttcattcagctccggttcccaacgatcaaggcgagttacatgatcccccatgttgtgcaaaaaagcggttagctccttcggtcctccgatcgttgtcagaagtaagttggccgcagtgttatcactcatggttatggcagcactgcataattctcttactgtcatgccatccgtaagatgcttttctgtgactggtgagtactcaaccaagtcattctgagaatagtgtatgcggcgaccgagttgctcttgcccggcgtcaatacgggataataccgcgccacatagcagaactttaaaagtgctcatcattggaaaacgttcttcggggcgaaaactctcaaggatcttaccgctgttgagatccagttcgatgtaacccactcgtgcacccaactgatcttcagcatcttttactttcaccagcgtttctgggtgagcaaaaacaggaaggcaaaatgccgcaaaaaagggaataagggcgacacggaaatgttgaatactcatactcttcctttttcaatcatggccgcgggattaaaagtcggggattggtgaacaaaaaggtgtttctctctttaagagaaatatcgttttgctaaacagttgatattgaggtatcattttatcgtaaaagacatttttgctcaacaattgcttgacggaaatcaacaaattttagcattttgtaaaaaagtcgctatataatttggtgaattggagttattttcatatttttgcatcccgaagagtttctcttaaagagagaaacatcttttgcataccttttccgaccgaatttttatgtcgtaaagaggggctttgcagggggtggactcagaaagatgagaatagatgactattgtagttgaaacacatagaaagttgctgatatacagaccgatacgcatatcgggatgaaccatgagtacgttcttttctcaaaaaacataaatattcgaaaagagatgcaataaattaaggagaggttataatgaacaaagtaaatataaaagatagtcaaaattttattacttcaaaatatcacatagaaaaaataatgaattgcataagtttagatgaaaaagataacatctttgaaataggtgcagggaaaggtcattttactgctggattggtaaagagatgtaattttgtaacggcgatagaaattgattctaaattatgtgaggtaactcgtaataagctcttaaattatcctaactatcaaatagtaaatgatgatatactgaaatttacatttcctagccacaatccatataaaatatttggcagcataccttacaacataagcacaaatataattcgaaaaattgtttttgaaagttcagccacaataagttatttaatagtggaatatggttttgctaaaatgttattagatacaaacagatcactagcattgctgttaatggcagaggtagatatttctatattagcaaaaattcctaggtattatttccatccaaaacctaaagtggatagcacattaattgtattaaaaagaaagccagcaaaaatggcatttaaagagagaaaaaaatatgaaacttttgtaatgaaatgggttaacaaagagtacgaaaaactgtttacaaaaaatcaatttaataaagctttaaaacatgcgagaatatatgatataaacaatattagtttcgaacaatttgtatcgctatttaatagttataaaatatttaacggctaaaaacaataggccacatgcaactgtaaatgtttacgcgggtaccgacaccgcggtggaggggaattcccatgtcagccgttaagtgttcctgtgtcactcaaaattgctttgagaggctctaagggcttctcagtgcgttacatccctggcttgttgtccacaaccgttaaaccttaaaagctttaaaagccttatatattcttttttttcttataaaacttaaaaccttagaggctatttaagttgctgatttatattaattttattgttcaaacatgagagcttagtacgtgaaacatgagagcttagtacgttagccatgagagcttagtacgttagccatgagggtttagttcgttaaacatgagagcttagtacgttaaacatgagagcttagtacgtgaaacatgagagcttagtacgtactatcaacaggttgaactgctgatcttcagatcctctacgccggacgcatcgtggccggatcaattccgttttccgctgcataaccctgcttcggggtcattatagcgattttttcggtatatccatcctttttcgcacgatatacaggattttgccaaagggttcgtgtagactttccttggtgtatccaacggcgtcagccgggcaggataggtgaagtaggcccacccgcgagcgggtgttccttcttcactgtcccttattcgcacctggcggtgctcaacgggaatcctgctctgcgaggctggccggctaccgccggcgtaacagatgagggcaagcggatggctgatgaaaccaagccaaccaggaagggcagcccacctatcacggaattgatccccctcgaattggaattcgttccgtctcgattcagatctaaaggatccaa

SEQ ID NO: 119 - DNA, 6125 bp, Artificial sequence
  Synthetic sequence
  misc_feature (324)..(332): n is a, c, g, or t
  misc_feature (344)..(344): n is a, c, g, or t
tctagatgatctggaagaagcaatgaaagctgctgttaagtctccgaatcaggtattgttcctgacaggtgtattcccatccggtaaacgcggatactttgcagttgatctgactcaggaataaattataaattaaggtaagaagattgtaggataagctaatgaaatagaaaaaggatgccgtcacacaacttgtcggcattcttttttgttttattagttgaaaatatagtgaaaaagttgcctaaatatgtatgttaacaaattatttgtcgtaactttgcactccaaatctgtttttaacatatggcactagactgatcnnnnnnnnnwwwaaawwtwanaataatgcgtaaaggcgaagagctgttcactggtgtcgtccctattctggtggaactggatggtgatgtcaacggtcataagttttccgtgcgtggcgagggtgaaggtgacgcaactaatggtaaactgacgctgaagttcatctgtactactggtaaactgccggttccttggccgactctggtaacgacgctgacttatggtgttcagtgctttgctcgttatccggaccatatgaagcagcatgacttcttcaagtccgccatgccggaaggctatgtgcaggaacgcacgatttcctttaaggatgacggcacgtacaaaacgcgtgcggaagtgaaatttgaaggcgataccctggtaaaccgcattgagctgaaaggcattgactttaaagaagacggcaatatcctgggccataagctggaatacaattttaacagccacaatgtttacatcaccgccgataaacaaaaaaatggcattaaagcgaattttaaaattcgccacaacgtggaggatggcagcgtgcagctggctgatcactaccagcaaaacactccaatcggtgatggtcctgttctgctgccagacaatcactatctgagcacgcaaagcgttctgtctaaagatccgaacgagaaacgcgatcatatggttctgctggagttcgtaaccgcagcgggcatcacgcatggtatggatgaactgtacaaaggatctgattacaaggacgatgatgataaggactacaaagatgatgatgacaaagattataaggacgatgatgataaaggtcatcatcatcatcatcactaaatcctagctgattagctcgagaaggccatcctgacggatggccttttttttgtatcgagacgactagtgtaattgcctatcttccagtgatggaacagcatttgtgcattggctgcaacaatcagccttacttgtgcctgttctatttccgaaccgaccgcttgtatgaatccatcaaaattcgttttctctatgttggattccttgttgctcatattgtgatgataatttctacaaatatagtcattggtaactatctatgaaactgtttgatacttttatagttgattaaacttgttcatggcatttgccttaatatcatccgctatgtcaatgtagggtttcatagctttgtagtcgctgtgtcccgtccatttcatgaccacctgtgccgggattccgagagccagcgcattgcagatgaatgtccttcttcctgcatgggtactgagcaaagcgtatttgggtgtgacttcatcaatacgttcatttcccttgtagtaggtttcccgtacaggctcgttgatttctgccagttcgcccagctctttcaggtaatcgttcatcttctggttgctgatgacgggcagagccatgtaattctcgaaatggatgtccttgtatttgtccagtatggctttgctgtatttgttcagttcaatcgtcaggctgtcggcagtcttgactgtggttatttcgatgtggtcggacttcacatcgcttcttttcagattgcgaacatccgaataccgcaaactcgtaaagcagcagaacaggaaaacatcacgcacacgttccaggtattgcttatccttgggtatctggtagtctttcagcttgttcagttcatcccaagtcaggaagattacttttttcgaggtggttttcagtttcggtttgaacgtatcgtatgcaatgttctgatgatgtcctttcttgaagctccagcgcaggaaccatttgaggaatcccatttgcttgccgatggtgctgtttctcatatccttggtgtcacgcaggaagttgacgtattcgttcaatccaaactcgttgaaatagttgaacgttgcatcctccttgaactctttgaggtggttcctcactgctgcaaatttttcataggtggatgccgtccagttattctggttaccgcactcttttacaaactcatcgaacacctcccaaaagctgacaggggcttcttccggctgttcttcgctggtgtctttcattctcatgttgaaagcttccttcaactgttgggtcgttggcatgacctcctgcacctcaaattccttgaaaatattctggatttcggcatagtatttcagcaagtccgtattgatttcggctgcactttgctttagcttgttggtacatccgctctttacccgctgcttatctgcatcccatttggctacgtcaatccggtagcccgttgtaaactcgatgcgttggctggcaaagatgacacgcatacggatgggtacgttctctacgattggcacaccgttctttttccggctctccaatgcaaaaatgatgttgcgcttgatattcataattgggtgcgtttgaaattctacacccaaatatacacccaattattgagatagcaaaagacatttagaaacatttacttttactctatattgtaatttacacttgattatcagtcgtttgcagtcttatgatattctgtgaaagtataagttcgagagcctgtctctccgcaaaaaacgctgaaaatcagcagattgcaaaacaaacaccctgttttacacccaagaatgtaaagtcggctgtttttgttttatttaagataatacaaccactacataataaaagagtagcgatattaaaagaatccgatgagaaaagactaatatttatctatccattcagtttgatttttcaggactttacatcgtcctgaaagtatttgttggtaccgaggacgcgacagctgcagacgcgttatgagtaaacttggtctgacagttaccaatgcttaatcagtgaggcacctatctcagcgatctgtctatttcgttcatccatagttgcctgactccccgtcgtgtagataactacgatacgggagggcttaccatctggccccagtgctgcaatgataccgcgggacccacgctcaccggctccagatttatcagcaataaaccagccagccggaagggccgagcgcagaagtggtcctgcaactttatccgcctccatccagtctattaattgttgccgggaagctagagtaagtagttcgccagttaatagtttgcgcaacgttgttgccattgctacaggcatcgtggtgtcacgctcgtcgtttggtatggcttcattcagctccggttcccaacgatcaaggcgagttacatgatcccccatgttgtgcaaaaaagcggttagctccttcggtcctccgatcgttgtcagaagtaagttggccgcagtgttatcactcatggttatggcagcactgcataattctcttactgtcatgccatccgtaagatgcttttctgtgactggtgagtactcaaccaagtcattctgagaatagtgtatgcggcgaccgagttgctcttgcccggcgtcaatacgggataataccgcgccacatagcagaactttaaaagtgctcatcattggaaaacgttcttcggggcgaaaactctcaaggatcttaccgctgttgagatccagttcgatgtaacccactcgtgcacccaactgatcttcagcatcttttactttcaccagcgtttctgggtgagcaaaaacaggaaggcaaaatgccgcaaaaaagggaataagggcgacacggaaatgttgaatactcatactcttcctttttcaatcatggccgcgggattaaaagtcggggattggtgaacaaaaaggtgtttctctctttaagagaaatatcgttttgctaaacagttgatattgaggtatcattttatcgtaaaagacatttttgctcaacaattgcttgacggaaatcaacaaattttagcattttgtaaaaaagtcgctatataatttggtgaattggagttattttcatatttttgcatcccgaagagtttctcttaaagagagaaacatcttttgcataccttttccgaccgaatttttatgtcgtaaagaggggctttgcagggggtggactcagaaagatgagaatagatgactattgtagttgaaacacatagaaagttgctgatatacagaccgatacgcatatcgggatgaaccatgagtacgttcttttctcaaaaaacataaatattcgaaaagagatgcaataaattaaggagaggttataatgaacaaagtaaatataaaagatagtcaaaattttattacttcaaaatatcacatagaaaaaataatgaattgcataagtttagatgaaaaagataacatctttgaaataggtgcagggaaaggtcattttactgctggattggtaaagagatgtaattttgtaacggcgatagaaattgattctaaattatgtgaggtaactcgtaataagctcttaaattatcctaactatcaaatagtaaatgatgatatactgaaatttacatttcctagccacaatccatataaaatatttggcagcataccttacaacataagcacaaatataattcgaaaaattgtttttgaaagttcagccacaataagttatttaatagtggaatatggttttgctaaaatgttattagatacaaacagatcactagcattgctgttaatggcagaggtagatatttctatattagcaaaaattcctaggtattatttccatccaaaacctaaagtggatagcacattaattgtattaaaaagaaagccagcaaaaatggcatttaaagagagaaaaaaatatgaaacttttgtaatgaaatgggttaacaaagagtacgaaaaactgtttacaaaaaatcaatttaataaagctttaaaacatgcgagaatatatgatataaacaatattagtttcgaacaatttgtatcgctatttaatagttataaaatatttaacggctaaaaacaataggccacatgcaactgtaaatgtttacgcgggtaccgacaccgcggtggaggggaattcccatgtcagccgttaagtgttcctgtgtcactcaaaattgctttgagaggctctaagggcttctcagtgcgttacatccctggcttgttgtccacaaccgttaaaccttaaaagctttaaaagccttatatattcttttttttcttataaaacttaaaaccttagaggctatttaagttgctgatttatattaattttattgttcaaacatgagagcttagtacgtgaaacatgagagcttagtacgttagccatgagagcttagtacgttagccatgagggtttagttcgttaaacatgagagcttagtacgttaaacatgagagcttagtacgtgaaacatgagagcttagtacgtactatcaacaggttgaactgctgatcttcagatcctctacgccggacgcatcgtggccggatcaattccgttttccgctgcataaccctgcttcggggtcattatagcgattttttcggtatatccatcctttttcgcacgatatacaggattttgccaaagggttcgtgtagactttccttggtgtatccaacggcgtcagccgggcaggataggtgaagtaggcccacccgcgagcgggtgttccttcttcactgtcccttattcgcacctggcggtgctcaacgggaatcctgctctgcgaggctggccggctaccgccggcgtaacagatgagggcaagcggatggctgatgaaaccaagccaaccaggaagggcagcccacctatcacggaattgatccccctcgaattggaattcgttccgtctcgattcagatctaaaggatccaa

SEQ ID NO: 120 - DNA, 5978 bp, Artificial sequence
  Synthetic sequence
cgagttgctcttgcccggcgtcaatacgggataataccgcgccacatagcagaactttaaaagtgctcatcattggaaaacgttcttcggggcgaaaactctcaaggatcttaccgctgttgagatccagttcgatgtaacccactcgtgcacccaactgatcttcagcatcttttactttcaccagcgtttctgggtgagcaaaaacaggaaggcaaaatgccgcaaaaaagggaataagggcgacacggaaatgttgaatactcatactcttcctttttcaatcatggccgcgggattaaaagtcggggattggtgaacaaaaaggtgtttctctctttaagagaaatatcgttttgctaaacagttgatattgaggtatcattttatcgtaaaagacatttttgctcaacaattgcttgacggaaatcaacaaattttagcattttgtaaaaaagtcgctatataatttggtgaattggagttattttcatatttttgcatcccgaagagtttctcttaaagagagaaacatcttttgcataccttttccgaccgaatttttatgtcgtaaagaggggctttgcagggggtggactcagaaagatgagaatagatgactattgtagttgaaacacatagaaagttgctgatatacagaccgatacgcatatcgggatgaaccatgagtacgttcttttctcaaaaaacataaatattcgaaaagagatgcaataaattaaggagaggttataatgaacaaagtaaatataaaagatagtcaaaattttattacttcaaaatatcacatagaaaaaataatgaattgcataagtttagatgaaaaagataacatctttgaaataggtgcagggaaaggtcattttactgctggattggtaaagagatgtaattttgtaacggcgatagaaattgattctaaattatgtgaggtaactcgtaataagctcttaaattatcctaactatcaaatagtaaatgatgatatactgaaatttacatttcctagccacaatccatataaaatatttggcagcataccttacaacataagcacaaatataattcgaaaaattgtttttgaaagttcagccacaataagttatttaatagtggaatatggttttgctaaaatgttattagatacaaacagatcactagcattgctgttaatggcagaggtagatatttctatattagcaaaaattcctaggtattatttccatccaaaacctaaagtggatagcacattaattgtattaaaaagaaagccagcaaaaatggcatttaaagagagaaaaaaatatgaaacttttgtaatgaaatgggttaacaaagagtacgaaaaactgtttacaaaaaatcaatttaataaagctttaaaacatgcgagaatatatgatataaacaatattagtttcgaacaatttgtatcgctatttaatagttataaaatatttaacggctaaaaacaataggccacatgcaactgtaaatgtttacgcgggtaccgacaccgcggtggaggggaattcccatgtcagccgttaagtgttcctgtgtcactcaaaattgctttgagaggctctaagggcttctcagtgcgttacatccctggcttgttgtccacaaccgttaaaccttaaaagctttaaaagccttatatattcttttttttcttataaaacttaaaaccttagaggctatttaagttgctgatttatattaattttattgttcaaacatgagagcttagtacgtgaaacatgagagcttagtacgttagccatgagagcttagtacgttagccatgagggtttagttcgttaaacatgagagcttagtacgttaaacatgagagcttagtacgtgaaacatgagagcttagtacgtactatcaacaggttgaactgctgatcttcagatcctctacgccggacgcatcgtggccggatcaattccgttttccgctgcataaccctgcttcggggtcattatagcgattttttcggtatatccatcctttttcgcacgatatacaggattttgccaaagggttcgtgtagactttccttggtgtatccaacggcgtcagccgggcaggataggtgaagtaggcccacccgcgagcgggtgttccttcttcactgtcccttattcgcacctggcggtgctcaacgggaatcctgctctgcgaggctggccggctaccgccggcgtaacagatgagggcaagcggatggctgatgaaaccaagccaaccaggaagggcagcccacctatcacggaattgatccccctcgaattggaattcgttccgtctcgattcagatctaaaggatccaatctagataaaacgaaaggctcagtcgaaagactgggcctttcgttttacaattgggctaccttttttttgttttgtttgcaatggttaatctattgttaaaatttaaagtttcacttgaactttcaaataatgttcttatatttgcagtgtcgaaagaaacaaagtaggactgatctatggattcaaaaaaatttaaaataatgcgtaaaggcgaagagctgttcactggtgtcgtccctattctggtggaactggatggtgatgtcaacggtcataagttttccgtgcgtggcgagggtgaaggtgacgcaactaatggtaaactgacgctgaagttcatctgtactactggtaaactgccggttccttggccgactctggtaacgacgctgacttatggtgttcagtgctttgctcgttatccggaccatatgaagcagcatgacttcttcaagtccgccatgccggaaggctatgtgcaggaacgcacgatttcctttaaggatgacggcacgtacaaaacgcgtgcggaagtgaaatttgaaggcgataccctggtaaaccgcattgagctgaaaggcattgactttaaagaagacggcaatatcctgggccataagctggaatacaattttaacagccacaatgtttacatcaccgccgataaacaaaaaaatggcattaaagcgaattttaaaattcgccacaacgtggaggatggcagcgtgcagctggctgatcactaccagcaaaacactccaatcggtgatggtcctgttctgctgccagacaatcactatctgagcacgcaaagcgttctgtctaaagatccgaacgagaaacgcgatcatatggttctgctggagttcgtaaccgcagcgggcatcacgcatggtatggatgaactgtacaaaggatctgattacaaggacgatgatgataaggactacaaagatgatgatgacaaagattataaggacgatgatgataaaggtcatcatcatcatcatcactaaatcctagctgattagctcgagaaggccatcctgacggatggccttttttttgtatcgagacgactagtgtaattgcctatcttccagtgatggaacagcatttgtgcattggctgcaacaatcagccttacttgtgcctgttctatttccgaaccgaccgcttgtatgaatccatcaaaattcgttttctctatgttggattccttgttgctcatattgtgatgataatttctacaaatatagtcattggtaactatctatgaaactgtttgatacttttatagttgattaaacttgttcatggcatttgccttaatatcatccgctatgtcaatgtagggtttcatagctttgtagtcgctgtgtcccgtccatttcatgaccacctgtgccgggattccgagagccagcgcattgcagatgaatgtccttcttcctgcatgggtactgagcaaagcgtatttgggtgtgacttcatcaatacgttcatttcccttgtagtaggtttcccgtacaggctcgttgatttctgccagttcgcccagctctttcaggtaatcgttcatcttctggttgctgatgacgggcagagccatgtaattctcgaaatggatgtccttgtatttgtccagtatggctttgctgtatttgttcagttcaatcgtcaggctgtcggcagtcttgactgtggttatttcgatgtggtcggacttcacatcgcttcttttcagattgcgaacatccgaataccgcaaactcgtaaagcagcagaacaggaaaacatcacgcacacgttccaggtattgcttatccttgggtatctggtagtctttcagcttgttcagttcatcccaagtcaggaagattacttttttcgaggtggttttcagtttcggtttgaacgtatcgtatgcaatgttctgatgatgtcctttcttgaagctccagcgcaggaaccatttgaggaatcccatttgcttgccgatggtgctgtttctcatatccttggtgtcacgcaggaagttgacgtattcgttcaatccaaactcgttgaaatagttgaacgttgcatcctccttgaactctttgaggtggttcctcactgctgcaaatttttcataggtggatgccgtccagttattctggttaccgcactcttttacaaactcatcgaacacctcccaaaagctgacaggggcttcttccggctgttcttcgctggtgtctttcattctcatgttgaaagcttccttcaactgttgggtcgttggcatgacctcctgcacctcaaattccttgaaaatattctggatttcggcatagtatttcagcaagtccgtattgatttcggctgcactttgctttagcttgttggtacatccgctctttacccgctgcttatctgcatcccatttggctacgtcaatccggtagcccgttgtaaactcgatgcgttggctggcaaagatgacacgcatacggatgggtacgttctctacgattggcacaccgttctttttccggctctccaatgcaaaaatgatgttgcgcttgatattcataattgggtgcgtttgaaattctacacccaaatatacacccaattattgagatagcaaaagacatttagaaacatttacttttactctatattgtaatttacacttgattatcagtcgtttgcagtcttatgatattctgtgaaagtataagttcgagagcctgtctctccgcaaaaaacgctgaaaatcagcagattgcaaaacaaacaccctgttttacacccaagaatgtaaagtcggctgtttttgttttatttaagataatacaaccactacataataaaagagtagcgatattaaaagaatccgatgagaaaagactaatatttatctatccattcagtttgatttttcaggactttacatcgtcctgaaagtatttgttggtaccgaggacgcgacagctgcagacgcgttatgagtaaacttggtctgacagttaccaatgcttaatcagtgaggcacctatctcagcgatctgtctatttcgttcatccatagttgcctgactccccgtcgtgtagataactacgatacgggagggcttaccatctggccccagtgctgcaatgataccgcgggacccacgctcaccggctccagatttatcagcaataaaccagccagccggaagggccgagcgcagaagtggtcctgcaactttatccgcctccatccagtctattaattgttgccgggaagctagagtaagtagttcgccagttaatagtttgcgcaacgttgttgccattgctacaggcatcgtggtgtcacgctcgtcgtttggtatggcttcattcagctccggttcccaacgatcaaggcgagttacatgatcccccatgttgtgcaaaaaagcggttagctccttcggtcctccgatcgttgtcagaagtaagttggccgcagtgttatcactcatggttatggcagcactgcataattctcttactgtcatgccatccgtaagatgcttttctgtgactggtgagtactcaaccaagtcattctgagaatagtgtatgcggcgac

SEQ ID NO: 121 - DNA, 6335 bp, Artificial sequence
  Synthetic sequence
cgagttgctcttgcccggcgtcaatacgggataataccgcgccacatagcagaactttaaaagtgctcatcattggaaaacgttcttcggggcgaaaactctcaaggatcttaccgctgttgagatccagttcgatgtaacccactcgtgcacccaactgatcttcagcatcttttactttcaccagcgtttctgggtgagcaaaaacaggaaggcaaaatgccgcaaaaaagggaataagggcgacacggaaatgttgaatactcatactcttcctttttcaatcatggccgcgggattaaaagtcggggattggtgaacaaaaaggtgtttctctctttaagagaaatatcgttttgctaaacagttgatattgaggtatcattttatcgtaaaagacatttttgctcaacaattgcttgacggaaatcaacaaattttagcattttgtaaaaaagtcgctatataatttggtgaattggagttattttcatatttttgcatcccgaagagtttctcttaaagagagaaacatcttttgcataccttttccgaccgaatttttatgtcgtaaagaggggctttgcagggggtggactcagaaagatgagaatagatgactattgtagttgaaacacatagaaagttgctgatatacagaccgatacgcatatcgggatgaaccatgagtacgttcttttctcaaaaaacataaatattcgaaaagagatgcaataaattaaggagaggttataatgaacaaagtaaatataaaagatagtcaaaattttattacttcaaaatatcacatagaaaaaataatgaattgcataagtttagatgaaaaagataacatctttgaaataggtgcagggaaaggtcattttactgctggattggtaaagagatgtaattttgtaacggcgatagaaattgattctaaattatgtgaggtaactcgtaataagctcttaaattatcctaactatcaaatagtaaatgatgatatactgaaatttacatttcctagccacaatccatataaaatatttggcagcataccttacaacataagcacaaatataattcgaaaaattgtttttgaaagttcagccacaataagttatttaatagtggaatatggttttgctaaaatgttattagatacaaacagatcactagcattgctgttaatggcagaggtagatatttctatattagcaaaaattcctaggtattatttccatccaaaacctaaagtggatagcacattaattgtattaaaaagaaagccagcaaaaatggcatttaaagagagaaaaaaatatgaaacttttgtaatgaaatgggttaacaaagagtacgaaaaactgtttacaaaaaatcaatttaataaagctttaaaacatgcgagaatatatgatataaacaatattagtttcgaacaatttgtatcgctatttaatagttataaaatatttaacggctaaaaacaataggccacatgcaactgtaaatgtttacgcgggtaccgacaccgcggtggaggggaattcccatgtcagccgttaagtgttcctgtgtcactcaaaattgctttgagaggctctaagggcttctcagtgcgttacatccctggcttgttgtccacaaccgttaaaccttaaaagctttaaaagccttatatattcttttttttcttataaaacttaaaaccttagaggctatttaagttgctgatttatattaattttattgttcaaacatgagagcttagtacgtgaaacatgagagcttagtacgttagccatgagagcttagtacgttagccatgagggtttagttcgttaaacatgagagcttagtacgttaaacatgagagcttagtacgtgaaacatgagagcttagtacgtactatcaacaggttgaactgctgatcttcagatcctctacgccggacgcatcgtggccggatcaattccgttttccgctgcataaccctgcttcggggtcattatagcgattttttcggtatatccatcctttttcgcacgatatacaggattttgccaaagggttcgtgtagactttccttggtgtatccaacggcgtcagccgggcaggataggtgaagtaggcccacccgcgagcgggtgttccttcttcactgtcccttattcgcacctggcggtgctcaacgggaatcctgctctgcgaggctggccggctaccgccggcgtaacagatgagggcaagcggatggctgatgaaaccaagccaaccaggaagggcagcccacctatcacggaattgatccccctcgaattggaattcgttccgtctcgattcagatctaaaggatccaatctaggctacttttgcacccgctttccaagagaagaaagccttgataaattgacttagtgtaaaagcaagtgtctgcttaaccataagaacaaaaaaacttccgataaagtttggaagataaagctaaaagttcttatctttgcagtccgattcgcaaagaaaaggtgttacgcttttcttctttaccttctttccctttcgctaagagagcctgaaaaacgatagaaaaagaaaaacgaaaaaaaaacttccgaaaatatttggtagttaaaataaaacctcttacctttgcacccgcttttaaaacgaaagcaagatgttctttgaaatattgataaacaatacaagtagtacaagaaaaaaatagaaccgtcaatacttgtcttatatgtagtaatatgtatgagtcataaggtattaatgaagtcaataaattgtacggcatcctgaacagagcaaaaatcagctttatgctgactaacaatacttttacaatgaagagtttgatcctggctcaggactgatctatggattcaaaaaaatttaaaataatgcgtaaaggcgaagagctgttcactggtgtcgtccctattctggtggaactggatggtgatgtcaacggtcataagttttccgtgcgtggcgagggtgaaggtgacgcaactaatggtaaactgacgctgaagttcatctgtactactggtaaactgccggttccttggccgactctggtaacgacgctgacttatggtgttcagtgctttgctcgttatccggaccatatgaagcagcatgacttcttcaagtccgccatgccggaaggctatgtgcaggaacgcacgatttcctttaaggatgacggcacgtacaaaacgcgtgcggaagtgaaatttgaaggcgataccctggtaaaccgcattgagctgaaaggcattgactttaaagaagacggcaatatcctgggccataagctggaatacaattttaacagccacaatgtttacatcaccgccgataaacaaaaaaatggcattaaagcgaattttaaaattcgccacaacgtggaggatggcagcgtgcagctggctgatcactaccagcaaaacactccaatcggtgatggtcctgttctgctgccagacaatcactatctgagcacgcaaagcgttctgtctaaagatccgaacgagaaacgcgatcatatggttctgctggagttcgtaaccgcagcgggcatcacgcatggtatggatgaactgtacaaaggatctgattacaaggacgatgatgataaggactacaaagatgatgatgacaaagattataaggacgatgatgataaaggtcatcatcatcatcatcactaaatcctagctgattagctcgagaaggccatcctgacggatggccttttttttgtatcgagacgactagtgtaattgcctatcttccagtgatggaacagcatttgtgcattggctgcaacaatcagccttacttgtgcctgttctatttccgaaccgaccgcttgtatgaatgcatcaaaattcgttttctctacgttggattccttgttgctcatattgtgatgataatttctacaaatatagtcattggtaactatctatgaaactgtttgatacttttatagttgattaaacttgttcatggcatttgccttaatatcatccgctatgtcaatgtagggtttcatagctttgtagtcgctgtgtcccgtccatttcatgaccacctgtgccgggattccgagagccagcgcattgcagatgaatgtccttcttcctgcatgggtactgagcaaagcgtatttgggtgtgacttcatcaatacgttcatttcccttgtagtaggtttcccgtacaggctcgttgatttctgccagttcgcccagctctttcaggtaatcgttcatcttctggttgctgatgacgggcagagccatgtaattctcgaaatggatgtccttgtatttgtccagtatggctttgctgtatttgttcagttcaatcgtcaggctgtcggcagtcttgactgtggttatttcgatgtggtcggacttcacatcgcttcttttcagattgcgaacatccgaataccgcaaactcgtaaagcagcagaacaggaaaacatcacgcacacgttccaggtattgcttatccttgggtatctggtagtctttcagcttgttcagttcatcccaagtcaggaagattacttttttcgaggtggttttcagtttcggtttgaacgtatcgtatgcaatgttctgatgatgtcctttcttgaagctccagcgcaggaaccatttgaggaatcccatttgcttgccgatggtgctgtttctcatatccttggtgtcacgcaggaagttgacgtattcgttcaatccaaactcgttgaaatagttgaacgttgcatcctccttgaactctttgaggtggttcctcactgctgcaaatttttcataggtggatgccgtccagttattctggttaccgcactcttttacaaactcatcgaacacctcccaaaagctgacaggggcttcttccggctgttcttcgctggtgtctttcattctcatgttgaaagcttccttcaactgttgggtcgttggcatgacctcctgcacctcaaattccttgaaaatattctggatttcggcatagtatttcagcaagtccgtattgatttcggctgcactttgctttagcttgttggtacatccgctctttacccgctgcttatctgcatcccatttggctacgtcaatccggtagcccgttgtaaactcgatgcgttggctggcaaagatgacacgcatacggatgggtacgttctctacgattggcacaccgttctttttccggctctccaatgcaaaaatgatgttgcgcttgatattcataattgggtgcgtttgaaattctacacccaaatatacacccaattattgagatagcaaaagacatttagaaacatttacttttactctatattgtaatttacacttgattatcagtcgtttgcagtcttatgatattctgtgaaagtataagttcgagagcctgtctctccgcaaaaaacgctgaaaatcagcagattgcaaaacaaacaccctgttttacacccaagaatgtaaagtcggctgtttttgttttatttaagataatacaaccactacataataaaagagtagcgatattaaaagaatccgatgagaaaagactaatatttatctatccattcagtttgatttttcaggactttacatcgtcctgaaagtatttgttggtaccggtaccgaggacgcgacagctgcagacgcgttatgagtaaacttggtctgacagttaccaatgcttaatcagtgaggcacctatctcagcgatctgtctatttcgttcatccatagttgcctgactccccgtcgtgtagataactacgatacgggagggcttaccatctggccccagtgctgcaatgataccgcgggacccacgctcaccggctccagatttatcagcaataaaccagccagccggaagggccgagcgcagaagtggtcctgcaactttatccgcctccatccagtctattaattgttgccgggaagctagagtaagtagttcgccagttaatagtttgcgcaacgttgttgccattgctacaggcatcgtggtgtcacgctcgtcgtttggtatggcttcattcagctccggttcccaacgatcaaggcgagttacatgatcccccatgttgtgcaaaaaagcggttagctccttcggtcctccgatcgttgtcagaagtaagttggccgcagtgttatcactcatggttatggcagcactgcataattctcttactgtcatgccatccgtaagatgcttttctgtgactggtgagtactcaaccaagtcattctgagaatagtgtatgcggcgac

SEQ ID NO: 122 - DNA, 6131 bp, Artificial sequence
  Synthetic sequence
cgagttgctcttgcccggcgtcaatacgggataataccgcgccacatagcagaactttaaaagtgctcatcattggaaaacgttcttcggggcgaaaactctcaaggatcttaccgctgttgagatccagttcgatgtaacccactcgtgcacccaactgatcttcagcatcttttactttcaccagcgtttctgggtgagcaaaaacaggaaggcaaaatgccgcaaaaaagggaataagggcgacacggaaatgttgaatactcatactcttcctttttcaatcatggccgcgggattaaaagtcggggattggtgaacaaaaaggtgtttctctctttaagagaaatatcgttttgctaaacagttgatattgaggtatcattttatcgtaaaagacatttttgctcaacaattgcttgacggaaatcaacaaattttagcattttgtaaaaaagtcgctatataatttggtgaattggagttattttcatatttttgcatcccgaagagtttctcttaaagagagaaacatcttttgcataccttttccgaccgaatttttatgtcgtaaagaggggctttgcagggggtggactcagaaagatgagaatagatgactattgtagttgaaacacatagaaagttgctgatatacagaccgatacgcatatcgggatgaaccatgagtacgttcttttctcaaaaaacataaatattcgaaaagagatgcaataaattaaggagaggttataatgaacaaagtaaatataaaagatagtcaaaattttattacttcaaaatatcacatagaaaaaataatgaattgcataagtttagatgaaaaagataacatctttgaaataggtgcagggaaaggtcattttactgctggattggtaaagagatgtaattttgtaacggcgatagaaattgattctaaattatgtgaggtaactcgtaataagctcttaaattatcctaactatcaaatagtaaatgatgatatactgaaatttacatttcctagccacaatccatataaaatatttggcagcataccttacaacataagcacaaatataattcgaaaaattgtttttgaaagttcagccacaataagttatttaatagtggaatatggttttgctaaaatgttattagatacaaacagatcactagcattgctgttaatggcagaggtagatatttctatattagcaaaaattcctaggtattatttccatccaaaacctaaagtggatagcacattaattgtattaaaaagaaagccagcaaaaatggcatttaaagagagaaaaaaatatgaaacttttgtaatgaaatgggttaacaaagagtacgaaaaactgtttacaaaaaatcaatttaataaagctttaaaacatgcgagaatatatgatataaacaatattagtttcgaacaatttgtatcgctatttaatagttataaaatatttaacggctaaaaacaataggccacatgcaactgtaaatgtttacgcgggtaccgacaccgcggtggaggggaattcccatgtcagccgttaagtgttcctgtgtcactcaaaattgctttgagaggctctaagggcttctcagtgcgttacatccctggcttgttgtccacaaccgttaaaccttaaaagctttaaaagccttatatattcttttttttcttataaaacttaaaaccttagaggctatttaagttgctgatttatattaattttattgttcaaacatgagagcttagtacgtgaaacatgagagcttagtacgttagccatgagagcttagtacgttagccatgagggtttagttcgttaaacatgagagcttagtacgttaaacatgagagcttagtacgtgaaacatgagagcttagtacgtactatcaacaggttgaactgctgatcttcagatcctctacgccggacgcatcgtggccggatcaattccgttttccgctgcataaccctgcttcggggtcattatagcgattttttcggtatatccatcctttttcgcacgatatacaggattttgccaaagggttcgtgtagactttccttggtgtatccaacggcgtcagccgggcaggataggtgaagtaggcccacccgcgagcgggtgttccttcttcactgtcccttattcgcacctggcggtgctcaacgggaatcctgctctgcgaggctggccggctaccgccggcgtaacagatgagggcaagcggatggctgatgaaaccaagccaaccaggaagggcagcccacctatcacggaattgatccccctcgaattggaattcgttccgtctcgattcagatctaaaggatccaatctagatgatctggaagaagcaatgaaagctgctgttaagtctccgaatcaggtattgttcctgacaggtgtattcccatccggtaaacgcggatactttgcagttgatctgactcaggaataaattataaattaaggtaagaagattgtaggataagctaatgaaatagaaaaaggatgccgtcacacaacttgtcggcattcttttttgttttattagttgaaaatatagtgaaaaagttgcctaaatatgtatgttaacaaattatttgtcgtaactttgcactccaaatctgtttttaacatatggcactagactgatctatggattcaaaaaaatttaaaataatgcgtaaaggcgaagagctgttcactggtgtcgtccctattctggtggaactggatggtgatgtcaacggtcataagttttccgtgcgtggcgagggtgaaggtgacgcaactaatggtaaactgacgctgaagttcatctgtactactggtaaactgccggttccttggccgactctggtaacgacgctgacttatggtgttcagtgctttgctcgttatccggaccatatgaagcagcatgacttcttcaagtccgccatgccggaaggctatgtgcaggaacgcacgatttcctttaaggatgacggcacgtacaaaacgcgtgcggaagtgaaatttgaaggcgataccctggtaaaccgcattgagctgaaaggcattgactttaaagaagacggcaatatcctgggccataagctggaatacaattttaacagccacaatgtttacatcaccgccgataaacaaaaaaatggcattaaagcgaattttaaaattcgccacaacgtggaggatggcagcgtgcagctggctgatcactaccagcaaaacactccaatcggtgatggtcctgttctgctgccagacaatcactatctgagcacgcaaagcgttctgtctaaagatccgaacgagaaacgcgatcatatggttctgctggagttcgtaaccgcagcgggcatcacgcatggtatggatgaactgtacaaaggatctgattacaaggacgatgatgataaggactacaaagatgatgatgacaaagattataaggacgatgatgataaaggtcatcatcatcatcatcactaaatcctagctgattagctcgagaaggccatcctgacggatggccttttttttgtatcgagacgactagtgtaattgcctatcttccagtgatggaacagcatttgtgcattggctgcaacaatcagccttacttgtgcctgttctatttccgaaccgaccgcttgtatgaatgcatcaaaattcgttttctctacgttggattccttgttgctcatattgtgatgataatttctacaaatatagtcattggtaactatctatgaaactgtttgatacttttatagttgattaaacttgttcatggcatttgccttaatatcatccgctatgtcaatgtagggtttcatagctttgtagtcgctgtgtcccgtccatttcatgaccacctgtgccgggattccgagagccagcgcattgcagatgaatgtccttcttcctgcatgggtactgagcaaagcgtatttgggtgtgacttcatcaatacgttcatttcccttgtagtaggtttcccgtacaggctcgttgatttctgccagttcgcccagctctttcaggtaatcgttcatcttctggttgctgatgacgggcagagccatgtaattctcgaaatggatgtccttgtatttgtccagtatggctttgctgtatttgttcagttcaatcgtcaggctgtcggcagtcttgactgtggttatttcgatgtggtcggacttcacatcgcttcttttcagattgcgaacatccgaataccgcaaactcgtaaagcagcagaacaggaaaacatcacgcacacgttccaggtattgcttatccttgggtatctggtagtctttcagcttgttcagttcatcccaagtcaggaagattacttttttcgaggtggttttcagtttcggtttgaacgtatcgtatgcaatgttctgatgatgtcctttcttgaagctccagcgcaggaaccatttgaggaatcccatttgcttgccgatggtgctgtttctcatatccttggtgtcacgcaggaagttgacgtattcgttcaatccaaactcgttgaaatagttgaacgttgcatcctccttgaactctttgaggtggttcctcactgctgcaaatttttcataggtggatgccgtccagttattctggttaccgcactcttttacaaactcatcgaacacctcccaaaagctgacaggggcttcttccggctgttcttcgctggtgtctttcattctcatgttgaaagcttccttcaactgttgggtcgttggcatgacctcctgcacctcaaattccttgaaaatattctggatttcggcatagtatttcagcaagtccgtattgatttcggctgcactttgctttagcttgttggtacatccgctctttacccgctgcttatctgcatcccatttggctacgtcaatccggtagcccgttgtaaactcgatgcgttggctggcaaagatgacacgcatacggatgggtacgttctctacgattggcacaccgttctttttccggctctccaatgcaaaaatgatgttgcgcttgatattcataattgggtgcgtttgaaattctacacccaaatatacacccaattattgagatagcaaaagacatttagaaacatttacttttactctatattgtaatttacacttgattatcagtcgtttgcagtcttatgatattctgtgaaagtataagttcgagagcctgtctctccgcaaaaaacgctgaaaatcagcagattgcaaaacaaacaccctgttttacacccaagaatgtaaagtcggctgtttttgttttatttaagataatacaaccactacataataaaagagtagcgatattaaaagaatccgatgagaaaagactaatatttatctatccattcagtttgatttttcaggactttacatcgtcctgaaagtatttgttggtaccggtaccgaggacgcgacagctgcagacgcgttatgagtaaacttggtctgacagttaccaatgcttaatcagtgaggcacctatctcagcgatctgtctatttcgttcatccatagttgcctgactccccgtcgtgtagataactacgatacgggagggcttaccatctggccccagtgctgcaatgataccgcgggacccacgctcaccggctccagatttatcagcaataaaccagccagccggaagggccgagcgcagaagtggtcctgcaactttatccgcctccatccagtctattaattgttgccgggaagctagagtaagtagttcgccagttaatagtttgcgcaacgttgttgccattgctacaggcatcgtggtgtcacgctcgtcgtttggtatggcttcattcagctccggttcccaacgatcaaggcgagttacatgatcccccatgttgtgcaaaaaagcggttagctccttcggtcctccgatcgttgtcagaagtaagttggccgcagtgttatcactcatggttatggcagcactgcataattctcttactgtcatgccatccgtaagatgcttttctgtgactggtgagtactcaaccaagtcattctgagaatagtgtatgcggcgac

SEQ ID NO: 123 - DNA, 6320 bp, Artificial sequence
  Synthetic sequence
cgagttgctcttgcccggcgtcaatacgggataataccgcgccacatagcagaactttaaaagtgctcatcattggaaaacgttcttcggggcgaaaactctcaaggatcttaccgctgttgagatccagttcgatgtaacccactcgtgcacccaactgatcttcagcatcttttactttcaccagcgtttctgggtgagcaaaaacaggaaggcaaaatgccgcaaaaaagggaataagggcgacacggaaatgttgaatactcatactcttcctttttcaatcatggccgcgggattaaaagtcggggattggtgaacaaaaaggtgtttctctctttaagagaaatatcgttttgctaaacagttgatattgaggtatcattttatcgtaaaagacatttttgctcaacaattgcttgacggaaatcaacaaattttagcattttgtaaaaaagtcgctatataatttggtgaattggagttattttcatatttttgcatcccgaagagtttctcttaaagagagaaacatcttttgcataccttttccgaccgaatttttatgtcgtaaagaggggctttgcagggggtggactcagaaagatgagaatagatgactattgtagttgaaacacatagaaagttgctgatatacagaccgatacgcatatcgggatgaaccatgagtacgttcttttctcaaaaaacataaatattcgaaaagagatgcaataaattaaggagaggttataatgaacaaagtaaatataaaagatagtcaaaattttattacttcaaaatatcacatagaaaaaataatgaattgcataagtttagatgaaaaagataacatctttgaaataggtgcagggaaaggtcattttactgctggattggtaaagagatgtaattttgtaacggcgatagaaattgattctaaattatgtgaggtaactcgtaataagctcttaaattatcctaactatcaaatagtaaatgatgatatactgaaatttacatttcctagccacaatccatataaaatatttggcagcataccttacaacataagcacaaatataattcgaaaaattgtttttgaaagttcagccacaataagttatttaatagtggaatatggttttgctaaaatgttattagatacaaacagatcactagcattgctgttaatggcagaggtagatatttctatattagcaaaaattcctaggtattatttccatccaaaacctaaagtggatagcacattaattgtattaaaaagaaagccagcaaaaatggcatttaaagagagaaaaaaatatgaaacttttgtaatgaaatgggttaacaaagagtacgaaaaactgtttacaaaaaatcaatttaataaagctttaaaacatgcgagaatatatgatataaacaatattagtttcgaacaatttgtatcgctatttaatagttataaaatatttaacggctaaaaacaataggccacatgcaactgtaaatgtttacgcgggtaccgacaccgcggtggaggggaattcccatgtcagccgttaagtgttcctgtgtcactcaaaattgctttgagaggctctaagggcttctcagtgcgttacatccctggcttgttgtccacaaccgttaaaccttaaaagctttaaaagccttatatattcttttttttcttataaaacttaaaaccttagaggctatttaagttgctgatttatattaattttattgttcaaacatgagagcttagtacgtgaaacatgagagcttagtacgttagccatgagagcttagtacgttagccatgagggtttagttcgttaaacatgagagcttagtacgttaaacatgagagcttagtacgtgaaacatgagagcttagtacgtactatcaacaggttgaactgctgatcttcagatcctctacgccggacgcatcgtggccggatcaattccgttttccgctgcataaccctgcttcggggtcattatagcgattttttcggtatatccatcctttttcgcacgatatacaggattttgccaaagggttcgtgtagactttccttggtgtatccaacggcgtcagccgggcaggataggtgaagtaggcccacccgcgagcgggtgttccttcttcactgtcccttattcgcacctggcggtgctcaacgggaatcctgctctgcgaggctggccggctaccgccggcgtaacagatgagggcaagcggatggctgatgaaaccaagccaaccaggaagggcagcccacctatcacggaattgatccccctcgaattggaattcgttccgtctcgattcagatctaaaggatccaatctatatctttataaggatatgtatcttccagcgtgtacttatcatacagcagctctttggtgatttgaatttcttccggagtaatctttttgacgacaggttctgccacagtttccgcaattgtatcctgtgccagcgaatcgacctgcaaagtttcatcagaagatttttgtcctgtacgtgaagtgcaggaacagagtacgcaaaaagcgatggatatgccaaaacttattttattcatataatctatacagttcatcttggggttcgtttacgaatatacgttattataaggaataatccgcttctattgtttaaaaagtgtggaacaaatatgcttttttgccattaataacctgttgtcagtcattttgtcagtcaatttctgccaaacaatcattattttgctttggcatacttttcgcaactgatttagcgtcttcttcaagaagaggacaaatcatgaatataatgtataacaaataaaatcaaaaaaaagaactgactgatctatggattcaaaaaaatttaaaataatgcgtaaaggcgaagagctgttcactggtgtcgtccctattctggtggaactggatggtgatgtcaacggtcataagttttccgtgcgtggcgagggtgaaggtgacgcaactaatggtaaactgacgctgaagttcatctgtactactggtaaactgccggttccttggccgactctggtaacgacgctgacttatggtgttcagtgctttgctcgttatccggaccatatgaagcagcatgacttcttcaagtccgccatgccggaaggctatgtgcaggaacgcacgatttcctttaaggatgacggcacgtacaaaacgcgtgcggaagtgaaatttgaaggcgataccctggtaaaccgcattgagctgaaaggcattgactttaaagaagacggcaatatcctgggccataagctggaatacaattttaacagccacaatgtttacatcaccgccgataaacaaaaaaatggcattaaagcgaattttaaaattcgccacaacgtggaggatggcagcgtgcagctggctgatcactaccagcaaaacactccaatcggtgatggtcctgttctgctgccagacaatcactatctgagcacgcaaagcgttctgtctaaagatccgaacgagaaacgcgatcatatggttctgctggagttcgtaaccgcagcgggcatcacgcatggtatggatgaactgtacaaaggatctgattacaaggacgatgatgataaggactacaaagatgatgatgacaaagattataaggacgatgatgataaaggtcatcatcatcatcatcactaaatcctagctgattagctcgagaaggccatcctgacggatggccttttttttgtatcgagacgactagtgtaattgcctatcttccagtgatggaacagcatttgtgcattggctgcaacaatcagccttacttgtgcctgttctatttccgaaccgaccgcttgtatgaatgcatcaaaattcgttttctctacgttggattccttgttgctcatattgtgatgataatttctacaaatatagtcattggtaactatctatgaaactgtttgatacttttatagttgattaaacttgttcatggcatttgccttaatatcatccgctatgtcaatgtagggtttcatagctttgtagtcgctgtgtcccgtccatttcatgaccacctgtgccgggattccgagagccagcgcattgcagatgaatgtccttcttcctgcatgggtactgagcaaagcgtatttgggtgtgacttcatcaatacgttcatttcccttgtagtaggtttcccgtacaggctcgttgatttctgccagttcgcccagctctttcaggtaatcgttcatcttctggttgctgatgacgggcagagccatgtaattctcgaaatggatgtccttgtatttgtccagtatggctttgctgtatttgttcagttcaatcgtcaggctgtcggcagtcttgactgtggttatttcgatgtggtcggacttcacatcgcttcttttcagattgcgaacatccgaataccgcaaactcgtaaagcagcagaacaggaaaacatcacgcacacgttccaggtattgcttatccttgggtatctggtagtctttcagcttgttcagttcatcccaagtcaggaagattacttttttcgaggtggttttcagtttcggtttgaacgtatcgtatgcaatgttctgatgatgtcctttcttgaagctccagcgcaggaaccatttgaggaatcccatttgcttgccgatggtgctgtttctcatatccttggtgtcacgcaggaagttgacgtattcgttcaatccaaactcgttgaaatagttgaacgttgcatcctccttgaactctttgaggtggttcctcactgctgcaaatttttcataggtggatgccgtccagttattctggttaccgcactcttttacaaactcatcgaacacctcccaaaagctgacaggggcttcttccggctgttcttcgctggtgtctttcattctcatgttgaaagcttccttcaactgttgggtcgttggcatgacctcctgcacctcaaattccttgaaaatattctggatttcggcatagtatttcagcaagtccgtattgatttcggctgcactttgctttagcttgttggtacatccgctctttacccgctgcttatctgcatcccatttggctacgtcaatccggtagcccgttgtaaactcgatgcgttggctggcaaagatgacacgcatacggatgggtacgttctctacgattggcacaccgttctttttccggctctccaatgcaaaaatgatgttgcgcttgatattcataattgggtgcgtttgaaattctacacccaaatatacacccaattattgagatagcaaaagacatttagaaacatttacttttactctatattgtaatttacacttgattatcagtcgtttgcagtcttatgatattctgtgaaagtataagttcgagagcctgtctctccgcaaaaaacgctgaaaatcagcagattgcaaaacaaacaccctgttttacacccaagaatgtaaagtcggctgtttttgttttatttaagataatacaaccactacataataaaagagtagcgatattaaaagaatccgatgagaaaagactaatatttatctatccattcagtttgatttttcaggactttacatcgtcctgaaagtatttgttggtaccggtaccgaggacgcgacagctgcagacgcgttatgagtaaacttggtctgacagttaccaatgcttaatcagtgaggcacctatctcagcgatctgtctatttcgttcatccatagttgcctgactccccgtcgtgtagataactacgatacgggagggcttaccatctggccccagtgctgcaatgataccgcgggacccacgctcaccggctccagatttatcagcaataaaccagccagccggaagggccgagcgcagaagtggtcctgcaactttatccgcctccatccagtctattaattgttgccgggaagctagagtaagtagttcgccagttaatagtttgcgcaacgttgttgccattgctacaggcatcgtggtgtcacgctcgtcgtttggtatggcttcattcagctccggttcccaacgatcaaggcgagttacatgatcccccatgttgtgcaaaaaagcggttagctccttcggtcctccgatcgttgtcagaagtaagttggccgcagtgttatcactcatggttatggcagcactgcataattctcttactgtcatgccatccgtaagatgcttttctgtgactggtgagtactcaaccaagtcattctgagaatagtgtatgcggcgac

SEQ ID NO: 124 - DNA, 6320 bp, Artificial sequence
  Synthetic sequence
cgagttgctcttgcccggcgtcaatacgggataataccgcgccacatagcagaactttaaaagtgctcatcattggaaaacgttcttcggggcgaaaactctcaaggatcttaccgctgttgagatccagttcgatgtaacccactcgtgcacccaactgatcttcagcatcttttactttcaccagcgtttctgggtgagcaaaaacaggaaggcaaaatgccgcaaaaaagggaataagggcgacacggaaatgttgaatactcatactcttcctttttcaatcatggccgcgggattaaaagtcggggattggtgaacaaaaaggtgtttctctctttaagagaaatatcgttttgctaaacagttgatattgaggtatcattttatcgtaaaagacatttttgctcaacaattgcttgacggaaatcaacaaattttagcattttgtaaaaaagtcgctatataatttggtgaattggagttattttcatatttttgcatcccgaagagtttctcttaaagagagaaacatcttttgcataccttttccgaccgaatttttatgtcgtaaagaggggctttgcagggggtggactcagaaagatgagaatagatgactattgtagttgaaacacatagaaagttgctgatatacagaccgatacgcatatcgggatgaaccatgagtacgttcttttctcaaaaaacataaatattcgaaaagagatgcaataaattaaggagaggttataatgaacaaagtaaatataaaagatagtcaaaattttattacttcaaaatatcacatagaaaaaataatgaattgcataagtttagatgaaaaagataacatctttgaaataggtgcagggaaaggtcattttactgctggattggtaaagagatgtaattttgtaacggcgatagaaattgattctaaattatgtgaggtaactcgtaataagctcttaaattatcctaactatcaaatagtaaatgatgatatactgaaatttacatttcctagccacaatccatataaaatatttggcagcataccttacaacataagcacaaatataattcgaaaaattgtttttgaaagttcagccacaataagttatttaatagtggaatatggttttgctaaaatgttattagatacaaacagatcactagcattgctgttaatggcagaggtagatatttctatattagcaaaaattcctaggtattatttccatccaaaacctaaagtggatagcacattaattgtattaaaaagaaagccagcaaaaatggcatttaaagagagaaaaaaatatgaaacttttgtaatgaaatgggttaacaaagagtacgaaaaactgtttacaaaaaatcaatttaataaagctttaaaacatgcgagaatatatgatataaacaatattagtttcgaacaatttgtatcgctatttaatagttataaaatatttaacggctaaaaacaataggccacatgcaactgtaaatgtttacgcgggtaccgacaccgcggtggaggggaattcccatgtcagccgttaagtgttcctgtgtcactcaaaattgctttgagaggctctaagggcttctcagtgcgttacatccctggcttgttgtccacaaccgttaaaccttaaaagctttaaaagccttatatattcttttttttcttataaaacttaaaaccttagaggctatttaagttgctgatttatattaattttattgttcaaacatgagagcttagtacgtgaaacatgagagcttagtacgttagccatgagagcttagtacgttagccatgagggtttagttcgttaaacatgagagcttagtacgttaaacatgagagcttagtacgtgaaacatgagagcttagtacgtactatcaacaggttgaactgctgatcttcagatcctctacgccggacgcatcgtggccggatcaattccgttttccgctgcataaccctgcttcggggtcattatagcgattttttcggtatatccatcctttttcgcacgatatacaggattttgccaaagggttcgtgtagactttccttggtgtatccaacggcgtcagccgggcaggataggtgaagtaggcccacccgcgagcgggtgttccttcttcactgtcccttattcgcacctggcggtgctcaacgggaatcctgctctgcgaggctggccggctaccgccggcgtaacagatgagggcaagcggatggctgatgaaaccaagccaaccaggaagggcagcccacctatcacggaattgatccccctcgaattggaattcgttccgtctcgattcagatctaaaggatccaatctattattctctacgttcaccccgttgaggtaggtgtccggacgtcccgtctccggattggggcggaaagtaatccggatatcccggattgcttctttcagcttctccgtatcgataacgtctccgttaaatatcccgttttcaatactatataaggtgactgcgcgatacattgccccactatctatataaatgtatcctacttcgcgggcgagatctttggccattgtactttttccgcaggaggaaaagccgtcgattgcgattgttatctttttcatattatctgcttcttatatttgtccgccaaagatacgcttattttgaaaatcagccatagatttgactgtaaaagcaactgaatgagtatgaaagaattaaaaaagttaaaaagccggataaaaagatacaaagaaacggacggttatctgaaaatgtagtatatttgcccagagacacataggaagacacttttttttattaatcattatattaacaaaattgactgatctatggattcaaaaaaatttaaaataatgcgtaaaggcgaagagctgttcactggtgtcgtccctattctggtggaactggatggtgatgtcaacggtcataagttttccgtgcgtggcgagggtgaaggtgacgcaactaatggtaaactgacgctgaagttcatctgtactactggtaaactgccggttccttggccgactctggtaacgacgctgacttatggtgttcagtgctttgctcgttatccggaccatatgaagcagcatgacttcttcaagtccgccatgccggaaggctatgtgcaggaacgcacgatttcctttaaggatgacggcacgtacaaaacgcgtgcggaagtgaaatttgaaggcgataccctggtaaaccgcattgagctgaaaggcattgactttaaagaagacggcaatatcctgggccataagctggaatacaattttaacagccacaatgtttacatcaccgccgataaacaaaaaaatggcattaaagcgaattttaaaattcgccacaacgtggaggatggcagcgtgcagctggctgatcactaccagcaaaacactccaatcggtgatggtcctgttctgctgccagacaatcactatctgagcacgcaaagcgttctgtctaaagatccgaacgagaaacgcgatcatatggttctgctggagttcgtaaccgcagcgggcatcacgcatggtatggatgaactgtacaaaggatctgattacaaggacgatgatgataaggactacaaagatgatgatgacaaagattataaggacgatgatgataaaggtcatcatcatcatcatcactaaatcctagctgattagctcgagaaggccatcctgacggatggccttttttttgtatcgagacgactagtgtaattgcctatcttccagtgatggaacagcatttgtgcattggctgcaacaatcagccttacttgtgcctgttctatttccgaaccgaccgcttgtatgaatgcatcaaaattcgttttctctacgttggattccttgttgctcatattgtgatgataatttctacaaatatagtcattggtaactatctatgaaactgtttgatacttttatagttgattaaacttgttcatggcatttgccttaatatcatccgctatgtcaatgtagggtttcatagctttgtagtcgctgtgtcccgtccatttcatgaccacctgtgccgggattccgagagccagcgcattgcagatgaatgtccttcttcctgcatgggtactgagcaaagcgtatttgggtgtgacttcatcaatacgttcatttcccttgtagtaggtttcccgtacaggctcgttgatttctgccagttcgcccagctctttcaggtaatcgttcatcttctggttgctgatgacgggcagagccatgtaattctcgaaatggatgtccttgtatttgtccagtatggctttgctgtatttgttcagttcaatcgtcaggctgtcggcagtcttgactgtggttatttcgatgtggtcggacttcacatcgcttcttttcagattgcgaacatccgaataccgcaaactcgtaaagcagcagaacaggaaaacatcacgcacacgttccaggtattgcttatccttgggtatctggtagtctttcagcttgttcagttcatcccaagtcaggaagattacttttttcgaggtggttttcagtttcggtttgaacgtatcgtatgcaatgttctgatgatgtcctttcttgaagctccagcgcaggaaccatttgaggaatcccatttgcttgccgatggtgctgtttctcatatccttggtgtcacgcaggaagttgacgtattcgttcaatccaaactcgttgaaatagttgaacgttgcatcctccttgaactctttgaggtggttcctcactgctgcaaatttttcataggtggatgccgtccagttattctggttaccgcactcttttacaaactcatcgaacacctcccaaaagctgacaggggcttcttccggctgttcttcgctggtgtctttcattctcatgttgaaagcttccttcaactgttgggtcgttggcatgacctcctgcacctcaaattccttgaaaatattctggatttcggcatagtatttcagcaagtccgtattgatttcggctgcactttgctttagcttgttggtacatccgctctttacccgctgcttatctgcatcccatttggctacgtcaatccggtagcccgttgtaaactcgatgcgttggctggcaaagatgacacgcatacggatgggtacgttctctacgattggcacaccgttctttttccggctctccaatgcaaaaatgatgttgcgcttgatattcataattgggtgcgtttgaaattctacacccaaatatacacccaattattgagatagcaaaagacatttagaaacatttacttttactctatattgtaatttacacttgattatcagtcgtttgcagtcttatgatattctgtgaaagtataagttcgagagcctgtctctccgcaaaaaacgctgaaaatcagcagattgcaaaacaaacaccctgttttacacccaagaatgtaaagtcggctgtttttgttttatttaagataatacaaccactacataataaaagagtagcgatattaaaagaatccgatgagaaaagactaatatttatctatccattcagtttgatttttcaggactttacatcgtcctgaaagtatttgttggtaccggtaccgaggacgcgacagctgcagacgcgttatgagtaaacttggtctgacagttaccaatgcttaatcagtgaggcacctatctcagcgatctgtctatttcgttcatccatagttgcctgactccccgtcgtgtagataactacgatacgggagggcttaccatctggccccagtgctgcaatgataccgcgggacccacgctcaccggctccagatttatcagcaataaaccagccagccggaagggccgagcgcagaagtggtcctgcaactttatccgcctccatccagtctattaattgttgccgggaagctagagtaagtagttcgccagttaatagtttgcgcaacgttgttgccattgctacaggcatcgtggtgtcacgctcgtcgtttggtatggcttcattcagctccggttcccaacgatcaaggcgagttacatgatcccccatgttgtgcaaaaaagcggttagctccttcggtcctccgatcgttgtcagaagtaagttggccgcagtgttatcactcatggttatggcagcactgcataattctcttactgtcatgccatccgtaagatgcttttctgtgactggtgagtactcaaccaagtcattctgagaatagtgtatgcggcgac

SEQ ID NO: 125 - DNA, 6320 bp, Artificial sequence
  Synthetic sequence
cgagttgctcttgcccggcgtcaatacgggataataccgcgccacatagcagaactttaaaagtgctcatcattggaaaacgttcttcggggcgaaaactctcaaggatcttaccgctgttgagatccagttcgatgtaacccactcgtgcacccaactgatcttcagcatcttttactttcaccagcgtttctgggtgagcaaaaacaggaaggcaaaatgccgcaaaaaagggaataagggcgacacggaaatgttgaatactcatactcttcctttttcaatcatggccgcgggattaaaagtcggggattggtgaacaaaaaggtgtttctctctttaagagaaatatcgttttgctaaacagttgatattgaggtatcattttatcgtaaaagacatttttgctcaacaattgcttgacggaaatcaacaaattttagcattttgtaaaaaagtcgctatataatttggtgaattggagttattttcatatttttgcatcccgaagagtttctcttaaagagagaaacatcttttgcataccttttccgaccgaatttttatgtcgtaaagaggggctttgcagggggtggactcagaaagatgagaatagatgactattgtagttgaaacacatagaaagttgctgatatacagaccgatacgcatatcgggatgaaccatgagtacgttcttttctcaaaaaacataaatattcgaaaagagatgcaataaattaaggagaggttataatgaacaaagtaaatataaaagatagtcaaaattttattacttcaaaatatcacatagaaaaaataatgaattgcataagtttagatgaaaaagataacatctttgaaataggtgcagggaaaggtcattttactgctggattggtaaagagatgtaattttgtaacggcgatagaaattgattctaaattatgtgaggtaactcgtaataagctcttaaattatcctaactatcaaatagtaaatgatgatatactgaaatttacatttcctagccacaatccatataaaatatttggcagcataccttacaacataagcacaaatataattcgaaaaattgtttttgaaagttcagccacaataagttatttaatagtggaatatggttttgctaaaatgttattagatacaaacagatcactagcattgctgttaatggcagaggtagatatttctatattagcaaaaattcctaggtattatttccatccaaaacctaaagtggatagcacattaattgtattaaaaagaaagccagcaaaaatggcatttaaagagagaaaaaaatatgaaacttttgtaatgaaatgggttaacaaagagtacgaaaaactgtttacaaaaaatcaatttaataaagctttaaaacatgcgagaatatatgatataaacaatattagtttcgaacaatttgtatcgctatttaatagttataaaatatttaacggctaaaaacaataggccacatgcaactgtaaatgtttacgcgggtaccgacaccgcggtggaggggaattcccatgtcagccgttaagtgttcctgtgtcactcaaaattgctttgagaggctctaagggcttctcagtgcgttacatccctggcttgttgtccacaaccgttaaaccttaaaagctttaaaagccttatatattcttttttttcttataaaacttaaaaccttagaggctatttaagttgctgatttatattaattttattgttcaaacatgagagcttagtacgtgaaacatgagagcttagtacgttagccatgagagcttagtacgttagccatgagggtttagttcgttaaacatgagagcttagtacgttaaacatgagagcttagtacgtgaaacatgagagcttagtacgtactatcaacaggttgaactgctgatcttcagatcctctacgccggacgcatcgtggccggatcaattccgttttccgctgcataaccctgcttcggggtcattatagcgattttttcggtatatccatcctttttcgcacgatatacaggattttgccaaagggttcgtgtagactttccttggtgtatccaacggcgtcagccgggcaggataggtgaagtaggcccacccgcgagcgggtgttccttcttcactgtcccttattcgcacctggcggtgctcaacgggaatcctgctctgcgaggctggccggctaccgccggcgtaacagatgagggcaagcggatggctgatgaaaccaagccaaccaggaagggcagcccacctatcacggaattgatccccctcgaattggaattcgttccgtctcgattcagatctaaaggatccaatctactgatgtcgggtgaaacagcagcgccagagattggtaatactcttccccttcagaacattccggttggtactgtaattcacaatattgagttacgtccgggacagggtgctgctctggttagatcagctggaaactttgctcagttaacttctcgtgagggtaagtattgtgtgattaaattgccttcaggtgaagtaagacagattcttagcacttgtaaagctactatcggtagtgttggtaactcagatcatggattggaacgctcaggtaaggctggacgctctcgttggcaaggtcgtcgtcctcgtaaccgtggtgttgtaatgaacccggttgatcacccgatgggtggtggtgaaggacgttcttccggaggacatccaagatctcgtaagggattgtacgctaagggacttaagactagagctcctaagaaacaatcgtctaagtacattattgagagaagaaaaaagtaatctgattaattgagtaaactgactgatctatggattcaaaaaaatttaaaataatgcgtaaaggcgaagagctgttcactggtgtcgtccctattctggtggaactggatggtgatgtcaacggtcataagttttccgtgcgtggcgagggtgaaggtgacgcaactaatggtaaactgacgctgaagttcatctgtactactggtaaactgccggttccttggccgactctggtaacgacgctgacttatggtgttcagtgctttgctcgttatccggaccatatgaagcagcatgacttcttcaagtccgccatgccggaaggctatgtgcaggaacgcacgatttcctttaaggatgacggcacgtacaaaacgcgtgcggaagtgaaatttgaaggcgataccctggtaaaccgcattgagctgaaaggcattgactttaaagaagacggcaatatcctgggccataagctggaatacaattttaacagccacaatgtttacatcaccgccgataaacaaaaaaatggcattaaagcgaattttaaaattcgccacaacgtggaggatggcagcgtgcagctggctgatcactaccagcaaaacactccaatcggtgatggtcctgttctgctgccagacaatcactatctgagcacgcaaagcgttctgtctaaagatccgaacgagaaacgcgatcatatggttctgctggagttcgtaaccgcagcgggcatcacgcatggtatggatgaactgtacaaaggatctgattacaaggacgatgatgataaggactacaaagatgatgatgacaaagattataaggacgatgatgataaaggtcatcatcatcatcatcactaaatcctagctgattagctcgagaaggccatcctgacggatggccttttttttgtatcgagacgactagtgtaattgcctatcttccagtgatggaacagcatttgtgcattggctgcaacaatcagccttacttgtgcctgttctatttccgaaccgaccgcttgtatgaatgcatcaaaattcgttttctctacgttggattccttgttgctcatattgtgatgataatttctacaaatatagtcattggtaactatctatgaaactgtttgatacttttatagttgattaaacttgttcatggcatttgccttaatatcatccgctatgtcaatgtagggtttcatagctttgtagtcgctgtgtcccgtccatttcatgaccacctgtgccgggattccgagagccagcgcattgcagatgaatgtccttcttcctgcatgggtactgagcaaagcgtatttgggtgtgacttcatcaatacgttcatttcccttgtagtaggtttcccgtacaggctcgttgatttctgccagttcgcccagctctttcaggtaatcgttcatcttctggttgctgatgacgggcagagccatgtaattctcgaaatggatgtccttgtatttgtccagtatggctttgctgtatttgttcagttcaatcgtcaggctgtcggcagtcttgactgtggttatttcgatgtggtcggacttcacatcgcttcttttcagattgcgaacatccgaataccgcaaactcgtaaagcagcagaacaggaaaacatcacgcacacgttccaggtattgcttatccttgggtatctggtagtctttcagcttgttcagttcatcccaagtcaggaagattacttttttcgaggtggttttcagtttcggtttgaacgtatcgtatgcaatgttctgatgatgtcctttcttgaagctccagcgcaggaaccatttgaggaatcccatttgcttgccgatggtgctgtttctcatatccttggtgtcacgcaggaagttgacgtattcgttcaatccaaactcgttgaaatagttgaacgttgcatcctccttgaactctttgaggtggttcctcactgctgcaaatttttcataggtggatgccgtccagttattctggttaccgcactcttttacaaactcatcgaacacctcccaaaagctgacaggggcttcttccggctgttcttcgctggtgtctttcattctcatgttgaaagcttccttcaactgttgggtcgttggcatgacctcctgcacctcaaattccttgaaaatattctggatttcggcatagtatttcagcaagtccgtattgatttcggctgcactttgctttagcttgttggtacatccgctctttacccgctgcttatctgcatcccatttggctacgtcaatccggtagcccgttgtaaactcgatgcgttggctggcaaagatgacacgcatacggatgggtacgttctctacgattggcacaccgttctttttccggctctccaatgcaaaaatgatgttgcgcttgatattcataattgggtgcgtttgaaattctacacccaaatatacacccaattattgagatagcaaaagacatttagaaacatttacttttactctatattgtaatttacacttgattatcagtcgtttgcagtcttatgatattctgtgaaagtataagttcgagagcctgtctctccgcaaaaaacgctgaaaatcagcagattgcaaaacaaacaccctgttttacacccaagaatgtaaagtcggctgtttttgttttatttaagataatacaaccactacataataaaagagtagcgatattaaaagaatccgatgagaaaagactaatatttatctatccattcagtttgatttttcaggactttacatcgtcctgaaagtatttgttggtaccggtaccgaggacgcgacagctgcagacgcgttatgagtaaacttggtctgacagttaccaatgcttaatcagtgaggcacctatctcagcgatctgtctatttcgttcatccatagttgcctgactccccgtcgtgtagataactacgatacgggagggcttaccatctggccccagtgctgcaatgataccgcgggacccacgctcaccggctccagatttatcagcaataaaccagccagccggaagggccgagcgcagaagtggtcctgcaactttatccgcctccatccagtctattaattgttgccgggaagctagagtaagtagttcgccagttaatagtttgcgcaacgttgttgccattgctacaggcatcgtggtgtcacgctcgtcgtttggtatggcttcattcagctccggttcccaacgatcaaggcgagttacatgatcccccatgttgtgcaaaaaagcggttagctccttcggtcctccgatcgttgtcagaagtaagttggccgcagtgttatcactcatggttatggcagcactgcataattctcttactgtcatgccatccgtaagatgcttttctgtgactggtgagtactcaaccaagtcattctgagaatagtgtatgcggcgac

SEQ ID NO: 126 - DNA, 6070 bp, Artificial sequence
  Synthetic sequence
cgagttgctcttgcccggcgtcaatacgggataataccgcgccacatagcagaactttaaaagtgctcatcattggaaaacgttcttcggggcgaaaactctcaaggatcttaccgctgttgagatccagttcgatgtaacccactcgtgcacccaactgatcttcagcatcttttactttcaccagcgtttctgggtgagcaaaaacaggaaggcaaaatgccgcaaaaaagggaataagggcgacacggaaatgttgaatactcatactcttcctttttcaatcatggccgcgggattaaaagtcggggattggtgaacaaaaaggtgtttctctctttaagagaaatatcgttttgctaaacagttgatattgaggtatcattttatcgtaaaagacatttttgctcaacaattgcttgacggaaatcaacaaattttagcattttgtaaaaaagtcgctatataatttggtgaattggagttattttcatatttttgcatcccgaagagtttctcttaaagagagaaacatcttttgcataccttttccgaccgaatttttatgtcgtaaagaggggctttgcagggggtggactcagaaagatgagaatagatgactattgtagttgaaacacatagaaagttgctgatatacagaccgatacgcatatcgggatgaaccatgagtacgttcttttctcaaaaaacataaatattcgaaaagagatgcaataaattaaggagaggttataatgaacaaagtaaatataaaagatagtcaaaattttattacttcaaaatatcacatagaaaaaataatgaattgcataagtttagatgaaaaagataacatctttgaaataggtgcagggaaaggtcattttactgctggattggtaaagagatgtaattttgtaacggcgatagaaattgattctaaattatgtgaggtaactcgtaataagctcttaaattatcctaactatcaaatagtaaatgatgatatactgaaatttacatttcctagccacaatccatataaaatatttggcagcataccttacaacataagcacaaatataattcgaaaaattgtttttgaaagttcagccacaataagttatttaatagtggaatatggttttgctaaaatgttattagatacaaacagatcactagcattgctgttaatggcagaggtagatatttctatattagcaaaaattcctaggtattatttccatccaaaacctaaagtggatagcacattaattgtattaaaaagaaagccagcaaaaatggcatttaaagagagaaaaaaatatgaaacttttgtaatgaaatgggttaacaaagagtacgaaaaactgtttacaaaaaatcaatttaataaagctttaaaacatgcgagaatatatgatataaacaatattagtttcgaacaatttgtatcgctatttaatagttataaaatatttaacggctaaaaacaataggccacatgcaactgtaaatgtttacgcgggtaccgacaccgcggtggaggggaattcccatgtcagccgttaagtgttcctgtgtcactcaaaattgctttgagaggctctaagggcttctcagtgcgttacatccctggcttgttgtccacaaccgttaaaccttaaaagctttaaaagccttatatattcttttttttcttataaaacttaaaaccttagaggctatttaagttgctgatttatattaattttattgttcaaacatgagagcttagtacgtgaaacatgagagcttagtacgttagccatgagagcttagtacgttagccatgagggtttagttcgttaaacatgagagcttagtacgttaaacatgagagcttagtacgtgaaacatgagagcttagtacgtactatcaacaggttgaactgctgatcttcagatcctctacgccggacgcatcgtggccggatcaattccgttttccgctgcataaccctgcttcggggtcattatagcgattttttcggtatatccatcctttttcgcacgatatacaggattttgccaaagggttcgtgtagactttccttggtgtatccaacggcgtcagccgggcaggataggtgaagtaggcccacccgcgagcgggtgttccttcttcactgtcccttattcgcacctggcggtgctcaacgggaatcctgctctgcgaggctggccggctaccgccggcgtaacagatgagggcaagcggatggctgatgaaaccaagccaaccaggaagggcagcccacctatcacggaattgatccccctcgaattggaattcgttccgtctcgattcagatctaaaggatccaatctaatccatctttgcccacaatcagagtgacaactttggcaagaatgcggaagtagctcagttgatagagcattagccttccaagctgagggtcgcgggtttgagccccgtcttccgctcttttttttcttgctgttatagctcagcggtagagcacttccttggtaaggaagaggtcccgggttcaagtcccggtaacagctcataaagatgtaaatgctgattattaatcaaataaataacaagtaaagctgactgatctatggattcaaaaaaatttaaaataatgcgtaaaggcgaagagctgttcactggtgtcgtccctattctggtggaactggatggtgatgtcaacggtcataagttttccgtgcgtggcgagggtgaaggtgacgcaactaatggtaaactgacgctgaagttcatctgtactactggtaaactgccggttccttggccgactctggtaacgacgctgacttatggtgttcagtgctttgctcgttatccggaccatatgaagcagcatgacttcttcaagtccgccatgccggaaggctatgtgcaggaacgcacgatttcctttaaggatgacggcacgtacaaaacgcgtgcggaagtgaaatttgaaggcgataccctggtaaaccgcattgagctgaaaggcattgactttaaagaagacggcaatatcctgggccataagctggaatacaattttaacagccacaatgtttacatcaccgccgataaacaaaaaaatggcattaaagcgaattttaaaattcgccacaacgtggaggatggcagcgtgcagctggctgatcactaccagcaaaacactccaatcggtgatggtcctgttctgctgccagacaatcactatctgagcacgcaaagcgttctgtctaaagatccgaacgagaaacgcgatcatatggttctgctggagttcgtaaccgcagcgggcatcacgcatggtatggatgaactgtacaaaggatctgattacaaggacgatgatgataaggactacaaagatgatgatgacaaagattataaggacgatgatgataaaggtcatcatcatcatcatcactaaatcctagctgattagctcgagaaggccatcctgacggatggccttttttttgtatcgagacgactagtgtaattgcctatcttccagtgatggaacagcatttgtgcattggctgcaacaatcagccttacttgtgcctgttctatttccgaaccgaccgcttgtatgaatgcatcaaaattcgttttctctacgttggattccttgttgctcatattgtgatgataatttctacaaatatagtcattggtaactatctatgaaactgtttgatacttttatagttgattaaacttgttcatggcatttgccttaatatcatccgctatgtcaatgtagggtttcatagctttgtagtcgctgtgtcccgtccatttcatgaccacctgtgccgggattccgagagccagcgcattgcagatgaatgtccttcttcctgcatgggtactgagcaaagcgtatttgggtgtgacttcatcaatacgttcatttcccttgtagtaggtttcccgtacaggctcgttgatttctgccagttcgcccagctctttcaggtaatcgttcatcttctggttgctgatgacgggcagagccatgtaattctcgaaatggatgtccttgtatttgtccagtatggctttgctgtatttgttcagttcaatcgtcaggctgtcggcagtcttgactgtggttatttcgatgtggtcggacttcacatcgcttcttttcagattgcgaacatccgaataccgcaaactcgtaaagcagcagaacaggaaaacatcacgcacacgttccaggtattgcttatccttgggtatctggtagtctttcagcttgttcagttcatcccaagtcaggaagattacttttttcgaggtggttttcagtttcggtttgaacgtatcgtatgcaatgttctgatgatgtcctttcttgaagctccagcgcaggaaccatttgaggaatcccatttgcttgccgatggtgctgtttctcatatccttggtgtcacgcaggaagttgacgtattcgttcaatccaaactcgttgaaatagttgaacgttgcatcctccttgaactctttgaggtggttcctcactgctgcaaatttttcataggtggatgccgtccagttattctggttaccgcactcttttacaaactcatcgaacacctcccaaaagctgacaggggcttcttccggctgttcttcgctggtgtctttcattctcatgttgaaagcttccttcaactgttgggtcgttggcatgacctcctgcacctcaaattccttgaaaatattctggatttcggcatagtatttcagcaagtccgtattgatttcggctgcactttgctttagcttgttggtacatccgctctttacccgctgcttatctgcatcccatttggctacgtcaatccggtagcccgttgtaaactcgatgcgttggctggcaaagatgacacgcatacggatgggtacgttctctacgattggcacaccgttctttttccggctctccaatgcaaaaatgatgttgcgcttgatattcataattgggtgcgtttgaaattctacacccaaatatacacccaattattgagatagcaaaagacatttagaaacatttacttttactctatattgtaatttacacttgattatcagtcgtttgcagtcttatgatattctgtgaaagtataagttcgagagcctgtctctccgcaaaaaacgctgaaaatcagcagattgcaaaacaaacaccctgttttacacccaagaatgtaaagtcggctgtttttgttttatttaagataatacaaccactacataataaaagagtagcgatattaaaagaatccgatgagaaaagactaatatttatctatccattcagtttgatttttcaggactttacatcgtcctgaaagtatttgttggtaccggtaccgaggacgcgacagctgcagacgcgttatgagtaaacttggtctgacagttaccaatgcttaatcagtgaggcacctatctcagcgatctgtctatttcgttcatccatagttgcctgactccccgtcgtgtagataactacgatacgggagggcttaccatctggccccagtgctgcaatgataccgcgggacccacgctcaccggctccagatttatcagcaataaaccagccagccggaagggccgagcgcagaagtggtcctgcaactttatccgcctccatccagtctattaattgttgccgggaagctagagtaagtagttcgccagttaatagtttgcgcaacgttgttgccattgctacaggcatcgtggtgtcacgctcgtcgtttggtatggcttcattcagctccggttcccaacgatcaaggcgagttacatgatcccccatgttgtgcaaaaaagcggttagctccttcggtcctccgatcgttgtcagaagtaagttggccgcagtgttatcactcatggttatggcagcactgcataattctcttactgtcatgccatccgtaagatgcttttctgtgactggtgagtactcaaccaagtcattctgagaatagtgtatgcggcgac

SEQ ID NO: 127 - DNA, 6320 bp, Artificial sequence
  Synthetic sequence
cgagttgctcttgcccggcgtcaatacgggataataccgcgccacatagcagaactttaaaagtgctcatcattggaaaacgttcttcggggcgaaaactctcaaggatcttaccgctgttgagatccagttcgatgtaacccactcgtgcacccaactgatcttcagcatcttttactttcaccagcgtttctgggtgagcaaaaacaggaaggcaaaatgccgcaaaaaagggaataagggcgacacggaaatgttgaatactcatactcttcctttttcaatcatggccgcgggattaaaagtcggggattggtgaacaaaaaggtgtttctctctttaagagaaatatcgttttgctaaacagttgatattgaggtatcattttatcgtaaaagacatttttgctcaacaattgcttgacggaaatcaacaaattttagcattttgtaaaaaagtcgctatataatttggtgaattggagttattttcatatttttgcatcccgaagagtttctcttaaagagagaaacatcttttgcataccttttccgaccgaatttttatgtcgtaaagaggggctttgcagggggtggactcagaaagatgagaatagatgactattgtagttgaaacacatagaaagttgctgatatacagaccgatacgcatatcgggatgaaccatgagtacgttcttttctcaaaaaacataaatattcgaaaagagatgcaataaattaaggagaggttataatgaacaaagtaaatataaaagatagtcaaaattttattacttcaaaatatcacatagaaaaaataatgaattgcataagtttagatgaaaaagataacatctttgaaataggtgcagggaaaggtcattttactgctggattggtaaagagatgtaattttgtaacggcgatagaaattgattctaaattatgtgaggtaactcgtaataagctcttaaattatcctaactatcaaatagtaaatgatgatatactgaaatttacatttcctagccacaatccatataaaatatttggcagcataccttacaacataagcacaaatataattcgaaaaattgtttttgaaagttcagccacaataagttatttaatagtggaatatggttttgctaaaatgttattagatacaaacagatcactagcattgctgttaatggcagaggtagatatttctatattagcaaaaattcctaggtattatttccatccaaaacctaaagtggatagcacattaattgtattaaaaagaaagccagcaaaaatggcatttaaagagagaaaaaaatatgaaacttttgtaatgaaatgggttaacaaagagtacgaaaaactgtttacaaaaaatcaatttaataaagctttaaaacatgcgagaatatatgatataaacaatattagtttcgaacaatttgtatcgctatttaatagttataaaatatttaacggctaaaaacaataggccacatgcaactgtaaatgtttacgcgggtaccgacaccgcggtggaggggaattcccatgtcagccgttaagtgttcctgtgtcactcaaaattgctttgagaggctctaagggcttctcagtgcgttacatccctggcttgttgtccacaaccgttaaaccttaaaagctttaaaagccttatatattcttttttttcttataaaacttaaaaccttagaggctatttaagttgctgatttatattaattttattgttcaaacatgagagcttagtacgtgaaacatgagagcttagtacgttagccatgagagcttagtacgttagccatgagggtttagttcgttaaacatgagagcttagtacgttaaacatgagagcttagtacgtgaaacatgagagcttagtacgtactatcaacaggttgaactgctgatcttcagatcctctacgccggacgcatcgtggccggatcaattccgttttccgctgcataaccctgcttcggggtcattatagcgattttttcggtatatccatcctttttcgcacgatatacaggattttgccaaagggttcgtgtagactttccttggtgtatccaacggcgtcagccgggcaggataggtgaagtaggcccacccgcgagcgggtgttccttcttcactgtcccttattcgcacctggcggtgctcaacgggaatcctgctctgcgaggctggccggctaccgccggcgtaacagatgagggcaagcggatggctgatgaaaccaagccaaccaggaagggcagcccacctatcacggaattgatccccctcgaattggaattcgttccgtctcgattcagatctaaaggatccaatctactttccctggggtggctagcacaatgatggcttgccctgatatggaagtggaaggtaagattctgaaagcaatgaatgaagtgaagtcgttcgataaactttccggtggtggaatcggtttgtatgacgcaaataatgcgttggtgattgtacttgaaaagtaagatatacgtattatattaaataggtatgcctgtgtcgcacataacgatacaggcatattttttattcctttatgatctattcttttgctttattgaaccagagctgtttccatttgtttaatgagtcgatagctgtctggcttctatgtgacttgacagcagtcatttcgatttaaaactgtcgttttggcagaaaatatgtcacgtattcgtccgatttctttttggcacatggtttgttttttaatcagcgtccgtttgaaagcccttacaaagagaaagaaaacaaccggacaaaaagaaattgaataataataaataaaaagaataacgatcgactgatctatggattcaaaaaaatttaaaataatgcgtaaaggcgaagagctgttcactggtgtcgtccctattctggtggaactggatggtgatgtcaacggtcataagttttccgtgcgtggcgagggtgaaggtgacgcaactaatggtaaactgacgctgaagttcatctgtactactggtaaactgccggttccttggccgactctggtaacgacgctgacttatggtgttcagtgctttgctcgttatccggaccatatgaagcagcatgacttcttcaagtccgccatgccggaaggctatgtgcaggaacgcacgatttcctttaaggatgacggcacgtacaaaacgcgtgcggaagtgaaatttgaaggcgataccctggtaaaccgcattgagctgaaaggcattgactttaaagaagacggcaatatcctgggccataagctggaatacaattttaacagccacaatgtttacatcaccgccgataaacaaaaaaatggcattaaagcgaattttaaaattcgccacaacgtggaggatggcagcgtgcagctggctgatcactaccagcaaaacactccaatcggtgatggtcctgttctgctgccagacaatcactatctgagcacgcaaagcgttctgtctaaagatccgaacgagaaacgcgatcatatggttctgctggagttcgtaaccgcagcgggcatcacgcatggtatggatgaactgtacaaaggatctgattacaaggacgatgatgataaggactacaaagatgatgatgacaaagattataaggacgatgatgataaaggtcatcatcatcatcatcactaaatcctagctgattagctcgagaaggccatcctgacggatggccttttttttgtatcgagacgactagtgtaattgcctatcttccagtgatggaacagcatttgtgcattggctgcaacaatcagccttacttgtgcctgttctatttccgaaccgaccgcttgtatgaatgcatcaaaattcgttttctctacgttggattccttgttgctcatattgtgatgataatttctacaaatatagtcattggtaactatctatgaaactgtttgatacttttatagttgattaaacttgttcatggcatttgccttaatatcatccgctatgtcaatgtagggtttcatagctttgtagtcgctgtgtcccgtccatttcatgaccacctgtgccgggattccgagagccagcgcattgcagatgaatgtccttcttcctgcatgggtactgagcaaagcgtatttgggtgtgacttcatcaatacgttcatttcccttgtagtaggtttcccgtacaggctcgttgatttctgccagttcgcccagctctttcaggtaatcgttcatcttctggttgctgatgacgggcagagccatgtaattctcgaaatggatgtccttgtatttgtccagtatggctttgctgtatttgttcagttcaatcgtcaggctgtcggcagtcttgactgtggttatttcgatgtggtcggacttcacatcgcttcttttcagattgcgaacatccgaataccgcaaactcgtaaagcagcagaacaggaaaacatcacgcacacgttccaggtattgcttatccttgggtatctggtagtctttcagcttgttcagttcatcccaagtcaggaagattacttttttcgaggtggttttcagtttcggtttgaacgtatcgtatgcaatgttctgatgatgtcctttcttgaagctccagcgcaggaaccatttgaggaatcccatttgcttgccgatggtgctgtttctcatatccttggtgtcacgcaggaagttgacgtattcgttcaatccaaactcgttgaaatagttgaacgttgcatcctccttgaactctttgaggtggttcctcactgctgcaaatttttcataggtggatgccgtccagttattctggttaccgcactcttttacaaactcatcgaacacctcccaaaagctgacaggggcttcttccggctgttcttcgctggtgtctttcattctcatgttgaaagcttccttcaactgttgggtcgttggcatgacctcctgcacctcaaattccttgaaaatattctggatttcggcatagtatttcagcaagtccgtattgatttcggctgcactttgctttagcttgttggtacatccgctctttacccgctgcttatctgcatcccatttggctacgtcaatccggtagcccgttgtaaactcgatgcgttggctggcaaagatgacacgcatacggatgggtacgttctctacgattggcacaccgttctttttccggctctccaatgcaaaaatgatgttgcgcttgatattcataattgggtgcgtttgaaattctacacccaaatatacacccaattattgagatagcaaaagacatttagaaacatttacttttactctatattgtaatttacacttgattatcagtcgtttgcagtcttatgatattctgtgaaagtataagttcgagagcctgtctctccgcaaaaaacgctgaaaatcagcagattgcaaaacaaacaccctgttttacacccaagaatgtaaagtcggctgtttttgttttatttaagataatacaaccactacataataaaagagtagcgatattaaaagaatccgatgagaaaagactaatatttatctatccattcagtttgatttttcaggactttacatcgtcctgaaagtatttgttggtaccggtaccgaggacgcgacagctgcagacgcgttatgagtaaacttggtctgacagttaccaatgcttaatcagtgaggcacctatctcagcgatctgtctatttcgttcatccatagttgcctgactccccgtcgtgtagataactacgatacgggagggcttaccatctggccccagtgctgcaatgataccgcgggacccacgctcaccggctccagatttatcagcaataaaccagccagccggaagggccgagcgcagaagtggtcctgcaactttatccgcctccatccagtctattaattgttgccgggaagctagagtaagtagttcgccagttaatagtttgcgcaacgttgttgccattgctacaggcatcgtggtgtcacgctcgtcgtttggtatggcttcattcagctccggttcccaacgatcaaggcgagttacatgatcccccatgttgtgcaaaaaagcggttagctccttcggtcctccgatcgttgtcagaagtaagttggccgcagtgttatcactcatggttatggcagcactgcataattctcttactgtcatgccatccgtaagatgcttttctgtgactggtgagtactcaaccaagtcattctgagaatagtgtatgcggcgac

SEQ ID NO: 128 - DNA, 5960 bp, Artificial sequence
  Synthetic sequence
cccatgtcagccgttaagtgttcctgtgtcactcaaaattgctttgagaggctctaagggcttctcagtgcgttacatccctggcttgttgtccacaaccgttaaaccttaaaagctttaaaagccttatatattcttttttttcttataaaacttaaaaccttagaggctatttaagttgctgatttatattaattttattgttcaaacatgagagcttagtacgtgaaacatgagagcttagtacgttagccatgagagcttagtacgttagccatgagggtttagttcgttaaacatgagagcttagtacgttaaacatgagagcttagtacgtgaaacatgagagcttagtacgtactatcaacaggttgaactgctgatcttcagatcctctacgccggacgcatcgtggccggatcaattccgttttccgctgcataaccctgcttcggggtcattatagcgattttttcggtatatccatcctttttcgcacgatatacaggattttgccaaagggttcgtgtagactttccttggtgtatccaacggcgtcagccgggcaggataggtgaagtaggcccacccgcgagcgggtgttccttcttcactgtcccttattcgcacctggcggtgctcaacgggaatcctgctctgcgaggctggccggctaccgccggcgtaacagatgagggcaagcggatggctgatgaaaccaagccaaccaggaagggcagcccacctatcacggaattgatccccctcgaattggaattcgttccgtctcgattcagatctaaaggatccaatctagagtttgcaatggttaatctattgttaaaatttaaagtttcacttgaactttcaaataatgttcttatatttgcagtgtcgaaagaaacaaaggactgatcacacaacatttaaaaaataacattatgaaagcactcgaaaagagattcaaaggtaatattaacaataatttattttcaatgcgtaaaggcgaagagctgttcactggtgtcgtccctattctggtggaactggatggtgatgtcaacggtcataagttttccgtgcgtggcgagggtgaaggtgacgcaactaatggtaaactgacgctgaagttcatctgtactactggtaaactgccggttccttggccgactctggtaacgacgctgacttatggtgttcagtgctttgctcgttatccggaccatatgaagcagcatgacttcttcaagtccgccatgccggaaggctatgtgcaggaacgcacgatttcctttaaggatgacggcacgtacaaaacgcgtgcggaagtgaaatttgaaggcgataccctggtaaaccgcattgagctgaaaggcattgactttaaagaagacggcaatatcctgggccataagctggaatacaattttaacagccacaatgtttacatcaccgccgataaacaaaaaaatggcattaaagcgaattttaaaattcgccacaacgtggaggatggcagcgtgcagctggctgatcactaccagcaaaacactccaatcggtgatggtcctgttctgctgccagacaatcactatctgagcacgcaaagcgttctgtctaaagatccgaacgagaaacgcgatcatatggttctgctggagttcgtaaccgcagcgggcatcacgcatggtatggatgaactgtacaaaggatctgattacaaggacgatgatgataaggactacaaagatgatgatgacaaagattataaggacgatgatgataaaggtcatcatcatcatcatcactaaatcctagctgattagctcgagaaggccatcctgacggatggccttttttttgtatcgagacgactagtgtaattgcctatcttccagtgatggaacagcatttgtgcattggctgcaacaatcagccttacttgtgcctgttctatttccgaaccgaccgcttgtatgaatccatcaaaattcgttttctctatgttggattccttgttgctcatattgtgatgataatttctacaaatatagtcattggtaactatctatgaaactgtttgatacttttatagttgattaaacttgttcatggcatttgccttaatatcatccgctatgtcaatgtagggtttcatagctttgtagtcgctgtgtcccgtccatttcatgaccacctgtgccgggattccgagagccagcgcattgcagatgaatgtccttcttcctgcatgggtactgagcaaagcgtatttgggtgtgacttcatcaatacgttcatttcccttgtagtaggtttcccgtacaggctcgttgatttctgccagttcgcccagctctttcaggtaatcgttcatcttctggttgctgatgacgggcagagccatgtaattctcgaaatggatgtccttgtatttgtccagtatggctttgctgtatttgttcagttcaatcgtcaggctgtcggcagtcttgactgtggttatttcgatgtggtcggacttcacatcgcttcttttcagattgcgaacatccgaataccgcaaactcgtaaagcagcagaacaggaaaacatcacgcacacgttccaggtattgcttatccttgggtatctggtagtctttcagcttgttcagttcatcccaagtcaggaagattacttttttcgaggtggttttcagtttcggtttgaacgtatcgtatgcaatgttctgatgatgtcctttcttgaagctccagcgcaggaaccatttgaggaatcccatttgcttgccgatggtgctgtttctcatatccttggtgtcacgcaggaagttgacgtattcgttcaatccaaactcgttgaaatagttgaacgttgcatcctccttgaactctttgaggtggttcctcactgctgcaaatttttcataggtggatgccgtccagttattctggttaccgcactcttttacaaactcatcgaacacctcccaaaagctgacaggggcttcttccggctgttcttcgctggtgtctttcattctcatgttgaaagcttccttcaactgttgggtcgttggcatgacctcctgcacctcaaattccttgaaaatattctggatttcggcatagtatttcagcaagtccgtattgatttcggctgcactttgctttagcttgttggtacatccgctctttacccgctgcttatctgcatcccatttggctacgtcaatccggtagcccgttgtaaactcgatgcgttggctggcaaagatgacacgcatacggatgggtacgttctctacgattggcacaccgttctttttccggctctccaatgcaaaaatgatgttgcgcttgatattcataattgggtgcgtttgaaattctacacccaaatatacacccaattattgagatagcaaaagacatttagaaacatttacttttactctatattgtaatttacacttgattatcagtcgtttgcagtcttatgatattctgtgaaagtataagttcgagagcctgtctctccgcaaaaaacgctgaaaatcagcagattgcaaaacaaacaccctgttttacacccaagaatgtaaagtcggctgtttttgttttatttaagataatacaaccactacataataaaagagtagcgatattaaaagaatccgatgagaaaagactaatatttatctatccattcagtttgatttttcaggactttacatcgtcctgaaagtatttgttggtaccgaggacgcgacagctgcagacgcgttatgagtaaacttggtctgacagttaccaatgcttaatcagtgaggcacctatctcagcgatctgtctatttcgttcatccatagttgcctgactccccgtcgtgtagataactacgatacgggagggcttaccatctggccccagtgctgcaatgataccgcgggacccacgctcaccggctccagatttatcagcaataaaccagccagccggaagggccgagcgcagaagtggtcctgcaactttatccgcctccatccagtctattaattgttgccgggaagctagagtaagtagttcgccagttaatagtttgcgcaacgttgttgccattgctacaggcatcgtggtgtcacgctcgtcgtttggtatggcttcattcagctccggttcccaacgatcaaggcgagttacatgatcccccatgttgtgcaaaaaagcggttagctccttcggtcctccgatcgttgtcagaagtaagttggccgcagtgttatcactcatggttatggcagcactgcataattctcttactgtcatgccatccgtaagatgcttttctgtgactggtgagtactcaaccaagtcattctgagaatagtgtatgcggcgaccgagttgctcttgcccggcgtcaatacgggataataccgcgccacatagcagaactttaaaagtgctcatcattggaaaacgttcttcggggcgaaaactctcaaggatcttaccgctgttgagatccagttcgatgtaacccactcgtgcacccaactgatcttcagcatcttttactttcaccagcgtttctgggtgagcaaaaacaggaaggcaaaatgccgcaaaaaagggaataagggcgacacggaaatgttgaatactcatactcttcctttttcaatcatggccgcgggattaaaagtcggggattggtgaacaaaaaggtgtttctctctttaagagaaatatcgttttgctaaacagttgatattgaggtatcattttatcgtaaaagacatttttgctcaacaattgcttgacggaaatcaacaaattttagcattttgtaaaaaagtcgctatataatttggtgaattggagttattttcatatttttgcatcccgaagagtttctcttaaagagagaaacatcttttgcataccttttccgaccgaatttttatgtcgtaaagaggggctttgcagggggtggactcagaaagatgagaatagatgactattgtagttgaaacacatagaaagttgctgatatacagaccgatacgcatatcgggatgaaccatgagtacgttcttttctcaaaaaacataaatattcgaaaagagatgcaataaattaaggagaggttataatgaacaaagtaaatataaaagatagtcaaaattttattacttcaaaatatcacatagaaaaaataatgaattgcataagtttagatgaaaaagataacatctttgaaataggtgcagggaaaggtcattttactgctggattggtaaagagatgtaattttgtaacggcgatagaaattgattctaaattatgtgaggtaactcgtaataagctcttaaattatcctaactatcaaatagtaaatgatgatatactgaaatttacatttcctagccacaatccatataaaatatttggcagcataccttacaacataagcacaaatataattcgaaaaattgtttttgaaagttcagccacaataagttatttaatagtggaatatggttttgctaaaatgttattagatacaaacagatcactagcattgctgttaatggcagaggtagatatttctatattagcaaaaattcctaggtattatttccatccaaaacctaaagtggatagcacattaattgtattaaaaagaaagccagcaaaaatggcatttaaagagagaaaaaaatatgaaacttttgtaatgaaatgggttaacaaagagtacgaaaaactgtttacaaaaaatcaatttaataaagctttaaaacatgcgagaatatatgatataaacaatattagtttcgaacaatttgtatcgctatttaatagttataaaatatttaacggctaaaaacaataggccacatgcaactgtaaatgtttacgcgggtaccgacaccgcggtggaggggaatt

SEQ ID NO: 129 - DNA, 5678 bp, Artificial sequence
  Synthetic sequence
cgagttgctcttgcccggcgtcaatacgggataataccgcgccacatagcagaactttaaaagtgctcatcattggaaaacgttcttcggggcgaaaactctcaaggatcttaccgctgttgagatccagttcgatgtaacccactcgtgcacccaactgatcttcagcatcttttactttcaccagcgtttctgggtgagcaaaaacaggaaggcaaaatgccgcaaaaaagggaataagggcgacacggaaatgttgaatactcatactcttcctttttcaatcatggccgcgggattaaaagtcggggattggtgaacaaaaaggtgtttctctctttaagagaaatatcgttttgctaaacagttgatattgaggtatcattttatcgtaaaagacatttttgctcaacaattgcttgacggaaatcaacaaattttagcattttgtaaaaaagtcgctatataatttggtgaattggagttattttcatatttttgcatcccgaagagtttctcttaaagagagaaacatcttttgcataccttttccgaccgaatttttatgtcgtaaagaggggctttgcagggggtggactcagaaagatgagaatagatgactattgtagttgaaacacatagaaagttgctgatatacagaccgatacgcatatcgggatgaaccatgagtacgttcttttctcaaaaaacataaatattcgaaaagagatgcaataaattaaggagaggttataatgaacaaagtaaatataaaagatagtcaaaattttattacttcaaaatatcacatagaaaaaataatgaattgcataagtttagatgaaaaagataacatctttgaaataggtgcagggaaaggtcattttactgctggattggtaaagagatgtaattttgtaacggcgatagaaattgattctaaattatgtgaggtaactcgtaataagctcttaaattatcctaactatcaaatagtaaatgatgatatactgaaatttacatttcctagccacaatccatataaaatatttggcagcataccttacaacataagcacaaatataattcgaaaaattgtttttgaaagttcagccacaataagttatttaatagtggaatatggttttgctaaaatgttattagatacaaacagatcactagcattgctgttaatggcagaggtagatatttctatattagcaaaaattcctaggtattatttccatccaaaacctaaagtggatagcacattaattgtattaaaaagaaagccagcaaaaatggcatttaaagagagaaaaaaatatgaaacttttgtaatgaaatgggttaacaaagagtacgaaaaactgtttacaaaaaatcaatttaataaagctttaaaacatgcgagaatatatgatataaacaatattagtttcgaacaatttgtatcgctatttaatagttataaaatatttaacggctaaaaacaataggccacatgcaactgtaaatgtttacgcgggtaccgacaccgcggtggaggggaattcccatgtcagccgttaagtgttcctgtgtcactcaaaattgctttgagaggctctaagggcttctcagtgcgttacatccctggcttgttgtccacaaccgttaaaccttaaaagctttaaaagccttatatattcttttttttcttataaaacttaaaaccttagaggctatttaagttgctgatttatattaattttattgttcaaacatgagagcttagtacgtgaaacatgagagcttagtacgttagccatgagagcttagtacgttagccatgagggtttagttcgttaaacatgagagcttagtacgttaaacatgagagcttagtacgtgaaacatgagagcttagtacgtactatcaacaggttgaactgctgatcttcagatcctctacgccggacgcatcgtggccggatcaattccgttttccgctgcataaccctgcttcggggtcattatagcgattttttcggtatatccatcctttttcgcacgatatacaggattttgccaaagggttcgtgtagactttccttggtgtatccaacggcgtcagccgggcaggataggtgaagtaggcccacccgcgagcgggtgttccttcttcactgtcccttattcgcacctggcggtgctcaacgggaatcctgctctgcgaggctggccggctaccgccggcgtaacagatgagggcaagcggatggctgatgaaaccaagccaaccaggaagggcagcccacctatcacggaattgatccccctcgaattggaattcgttccgtctcgattcagatctaaaggatccaatctagataaaacgaaaggctcagtcgaaagactgggcctttcgttttacaattgggctaccttttttttgtaaaaaaaaaccccgcccctgacagggcggggttttttttttcacttgaactttcaaataatgttcttataaaaccagtgtcgaaagaaacaaagtaggactgatcgtccatcaatttaaaatttaaaataatggtttttactctggaagattttgttggcgattggcgtcagaccgcgggttataatttggatcaagtcctggaacagggtggcgtaagctctctgttccagaacctgggtgtgagcgtgacgccgattcagcgcatcgttctgtccggcgagaacggtctgaaaattgatattcatgtgatcatcccgtacgaaggcctgagcggtgaccaaatgggtcaaatcgagaaaatctttaaagtcgtctacccagttgacgatcaccacttcaaggttatcttgcattacggtacgctggtgattgatggtgtgaccccgaatatgattgactatttcggccgtccgtatgaaggcattgccgtttttgacggtaaaaagatcaccgtcaccggtaccctgtggaatggcaataagattattgacgagcgtctgattaacccggacggcagcctgctgttccgcgtgaccatcaacggtgtcacgggttggcgtctgtgcgagcgcatcctggcataaatcctagctgattagctcgagaaggccatcctgacggatggccttttttttgtatcgagacgactagtgtaattgcctatcttccagtgatggaacagcatttgtgcattggctgcaacaatcagccttacttgtgcctgttctatttccgaaccgaccgcttgtatgaatccatcaaaattcgttttctctatgttggattccttgttgctcatattgtgatgataatttctacaaatatagtcattggtaactatctatgaaactgtttgatacttttatagttgattaaacttgttcatggcatttgccttaatatcatccgctatgtcaatgtagggtttcatagctttgtagtcgctgtgtcccgtccatttcatgaccacctgtgccgggattccgagagccagcgcattgcagatgaatgtccttcttcctgcatgggtactgagcaaagcgtatttgggtgtgacttcatcaatacgttcatttcccttgtagtaggtttcccgtacaggctcgttgatttctgccagttcgcccagctctttcaggtaatcgttcatcttctggttgctgatgacgggcagagccatgtaattctcgaaatggatgtccttgtatttgtccagtatggctttgctgtatttgttcagttcaatcgtcaggctgtcggcagtcttgactgtggttatttcgatgtggtcggacttcacatcgcttcttttcagattgcgaacatccgaataccgcaaactcgtaaagcagcagaacaggaaaacatcacgcacacgttccaggtattgcttatccttgggtatctggtagtctttcagcttgttcagttcatcccaagtcaggaagattacttttttcgaggtggttttcagtttcggtttgaacgtatcgtatgcaatgttctgatgatgtcctttcttgaagctccagcgcaggaaccatttgaggaatcccatttgcttgccgatggtgctgtttctcatatccttggtgtcacgcaggaagttgacgtattcgttcaatccaaactcgttgaaatagttgaacgttgcatcctccttgaactctttgaggtggttcctcactgctgcaaatttttcataggtggatgccgtccagttattctggttaccgcactcttttacaaactcatcgaacacctcccaaaagctgacaggggcttcttccggctgttcttcgctggtgtctttcattctcatgttgaaagcttccttcaactgttgggtcgttggcatgacctcctgcacctcaaattccttgaaaatattctggatttcggcatagtatttcagcaagtccgtattgatttcggctgcactttgctttagcttgttggtacatccgctctttacccgctgcttatctgcatcccatttggctacgtcaatccggtagcccgttgtaaactcgatgcgttggctggcaaagatgacacgcatacggatgggtacgttctctacgattggcacaccgttctttttccggctctccaatgcaaaaatgatgttgcgcttgatattcataattgggtgcgtttgaaattctacacccaaatatacacccaattattgagatagcaaaagacatttagaaacatttacttttactctatattgtaatttacacttgattatcagtcgtttgcagtcttatgatattctgtgaaagtataagttcgagagcctgtctctccgcaaaaaacgctgaaaatcagcagattgcaaaacaaacaccctgttttacacccaagaatgtaaagtcggctgtttttgttttatttaagataatacaaccactacataataaaagagtagcgatattaaaagaatccgatgagaaaagactaatatttatctatccattcagtttgatttttcaggactttacatcgtcctgaaagtatttgttggtaccgaggacgcgacagctgcagacgcgttatgagtaaacttggtctgacagttaccaatgcttaatcagtgaggcacctatctcagcgatctgtctatttcgttcatccatagttgcctgactccccgtcgtgtagataactacgatacgggagggcttaccatctggccccagtgctgcaatgataccgcgggacccacgctcaccggctccagatttatcagcaataaaccagccagccggaagggccgagcgcagaagtggtcctgcaactttatccgcctccatccagtctattaattgttgccgggaagctagagtaagtagttcgccagttaatagtttgcgcaacgttgttgccattgctacaggcatcgtggtgtcacgctcgtcgtttggtatggcttcattcagctccggttcccaacgatcaaggcgagttacatgatcccccatgttgtgcaaaaaagcggttagctccttcggtcctccgatcgttgtcagaagtaagttggccgcagtgttatcactcatggttatggcagcactgcataattctcttactgtcatgccatccgtaagatgcttttctgtgactggtgagtactcaaccaagtcattctgagaatagtgtatgcggcgac

SEQ ID NO: 130 - DNA, 5678 bp, Artificial sequence
  Synthetic sequence
cgagttgctcttgcccggcgtcaatacgggataataccgcgccacatagcagaactttaaaagtgctcatcattggaaaacgttcttcggggcgaaaactctcaaggatcttaccgctgttgagatccagttcgatgtaacccactcgtgcacccaactgatcttcagcatcttttactttcaccagcgtttctgggtgagcaaaaacaggaaggcaaaatgccgcaaaaaagggaataagggcgacacggaaatgttgaatactcatactcttcctttttcaatcatggccgcgggattaaaagtcggggattggtgaacaaaaaggtgtttctctctttaagagaaatatcgttttgctaaacagttgatattgaggtatcattttatcgtaaaagacatttttgctcaacaattgcttgacggaaatcaacaaattttagcattttgtaaaaaagtcgctatataatttggtgaattggagttattttcatatttttgcatcccgaagagtttctcttaaagagagaaacatcttttgcataccttttccgaccgaatttttatgtcgtaaagaggggctttgcagggggtggactcagaaagatgagaatagatgactattgtagttgaaacacatagaaagttgctgatatacagaccgatacgcatatcgggatgaaccatgagtacgttcttttctcaaaaaacataaatattcgaaaagagatgcaataaattaaggagaggttataatgaacaaagtaaatataaaagatagtcaaaattttattacttcaaaatatcacatagaaaaaataatgaattgcataagtttagatgaaaaagataacatctttgaaataggtgcagggaaaggtcattttactgctggattggtaaagagatgtaattttgtaacggcgatagaaattgattctaaattatgtgaggtaactcgtaataagctcttaaattatcctaactatcaaatagtaaatgatgatatactgaaatttacatttcctagccacaatccatataaaatatttggcagcataccttacaacataagcacaaatataattcgaaaaattgtttttgaaagttcagccacaataagttatttaatagtggaatatggttttgctaaaatgttattagatacaaacagatcactagcattgctgttaatggcagaggtagatatttctatattagcaaaaattcctaggtattatttccatccaaaacctaaagtggatagcacattaattgtattaaaaagaaagccagcaaaaatggcatttaaagagagaaaaaaatatgaaacttttgtaatgaaatgggttaacaaagagtacgaaaaactgtttacaaaaaatcaatttaataaagctttaaaacatgcgagaatatatgatataaacaatattagtttcgaacaatttgtatcgctatttaatagttataaaatatttaacggctaaaaacaataggccacatgcaactgtaaatgtttacgcgggtaccgacaccgcggtggaggggaattcccatgtcagccgttaagtgttcctgtgtcactcaaaattgctttgagaggctctaagggcttctcagtgcgttacatccctggcttgttgtccacaaccgttaaaccttaaaagctttaaaagccttatatattcttttttttcttataaaacttaaaaccttagaggctatttaagttgctgatttatattaattttattgttcaaacatgagagcttagtacgtgaaacatgagagcttagtacgttagccatgagagcttagtacgttagccatgagggtttagttcgttaaacatgagagcttagtacgttaaacatgagagcttagtacgtgaaacatgagagcttagtacgtactatcaacaggttgaactgctgatcttcagatcctctacgccggacgcatcgtggccggatcaattccgttttccgctgcataaccctgcttcggggtcattatagcgattttttcggtatatccatcctttttcgcacgatatacaggattttgccaaagggttcgtgtagactttccttggtgtatccaacggcgtcagccgggcaggataggtgaagtaggcccacccgcgagcgggtgttccttcttcactgtcccttattcgcacctggcggtgctcaacgggaatcctgctctgcgaggctggccggctaccgccggcgtaacagatgagggcaagcggatggctgatgaaaccaagccaaccaggaagggcagcccacctatcacggaattgatccccctcgaattggaattcgttccgtctcgattcagatctaaaggatccaatctagataaaacgaaaggctcagtcgaaagactgggcctttcgttttacaattgggctaccttttttttgtaaaaaaaaaccccgcccctgacagggcggggttttttttttcacttgaactttcaaataatgttcttatatatgcagtgtcgaaagaaacaaagtaggactgatcgtccatcaatttaaaatttaaaataatggtttttactctggaagattttgttggcgattggcgtcagaccgcgggttataatttggatcaagtcctggaacagggtggcgtaagctctctgttccagaacctgggtgtgagcgtgacgccgattcagcgcatcgttctgtccggcgagaacggtctgaaaattgatattcatgtgatcatcccgtacgaaggcctgagcggtgaccaaatgggtcaaatcgagaaaatctttaaagtcgtctacccagttgacgatcaccacttcaaggttatcttgcattacggtacgctggtgattgatggtgtgaccccgaatatgattgactatttcggccgtccgtatgaaggcattgccgtttttgacggtaaaaagatcaccgtcaccggtaccctgtggaatggcaataagattattgacgagcgtctgattaacccggacggcagcctgctgttccgcgtgaccatcaacggtgtcacgggttggcgtctgtgcgagcgcatcctggcataaatcctagctgattagctcgagaaggccatcctgacggatggccttttttttgtatcgagacgactagtgtaattgcctatcttccagtgatggaacagcatttgtgcattggctgcaacaatcagccttacttgtgcctgttctatttccgaaccgaccgcttgtatgaatccatcaaaattcgttttctctatgttggattccttgttgctcatattgtgatgataatttctacaaatatagtcattggtaactatctatgaaactgtttgatacttttatagttgattaaacttgttcatggcatttgccttaatatcatccgctatgtcaatgtagggtttcatagctttgtagtcgctgtgtcccgtccatttcatgaccacctgtgccgggattccgagagccagcgcattgcagatgaatgtccttcttcctgcatgggtactgagcaaagcgtatttgggtgtgacttcatcaatacgttcatttcccttgtagtaggtttcccgtacaggctcgttgatttctgccagttcgcccagctctttcaggtaatcgttcatcttctggttgctgatgacgggcagagccatgtaattctcgaaatggatgtccttgtatttgtccagtatggctttgctgtatttgttcagttcaatcgtcaggctgtcggcagtcttgactgtggttatttcgatgtggtcggacttcacatcgcttcttttcagattgcgaacatccgaataccgcaaactcgtaaagcagcagaacaggaaaacatcacgcacacgttccaggtattgcttatccttgggtatctggtagtctttcagcttgttcagttcatcccaagtcaggaagattacttttttcgaggtggttttcagtttcggtttgaacgtatcgtatgcaatgttctgatgatgtcctttcttgaagctccagcgcaggaaccatttgaggaatcccatttgcttgccgatggtgctgtttctcatatccttggtgtcacgcaggaagttgacgtattcgttcaatccaaactcgttgaaatagttgaacgttgcatcctccttgaactctttgaggtggttcctcactgctgcaaatttttcataggtggatgccgtccagttattctggttaccgcactcttttacaaactcatcgaacacctcccaaaagctgacaggggcttcttccggctgttcttcgctggtgtctttcattctcatgttgaaagcttccttcaactgttgggtcgttggcatgacctcctgcacctcaaattccttgaaaatattctggatttcggcatagtatttcagcaagtccgtattgatttcggctgcactttgctttagcttgttggtacatccgctctttacccgctgcttatctgcatcccatttggctacgtcaatccggtagcccgttgtaaactcgatgcgttggctggcaaagatgacacgcatacggatgggtacgttctctacgattggcacaccgttctttttccggctctccaatgcaaaaatgatgttgcgcttgatattcataattgggtgcgtttgaaattctacacccaaatatacacccaattattgagatagcaaaagacatttagaaacatttacttttactctatattgtaatttacacttgattatcagtcgtttgcagtcttatgatattctgtgaaagtataagttcgagagcctgtctctccgcaaaaaacgctgaaaatcagcagattgcaaaacaaacaccctgttttacacccaagaatgtaaagtcggctgtttttgttttatttaagataatacaaccactacataataaaagagtagcgatattaaaagaatccgatgagaaaagactaatatttatctatccattcagtttgatttttcaggactttacatcgtcctgaaagtatttgttggtaccgaggacgcgacagctgcagacgcgttatgagtaaacttggtctgacagttaccaatgcttaatcagtgaggcacctatctcagcgatctgtctatttcgttcatccatagttgcctgactccccgtcgtgtagataactacgatacgggagggcttaccatctggccccagtgctgcaatgataccgcgggacccacgctcaccggctccagatttatcagcaataaaccagccagccggaagggccgagcgcagaagtggtcctgcaactttatccgcctccatccagtctattaattgttgccgggaagctagagtaagtagttcgccagttaatagtttgcgcaacgttgttgccattgctacaggcatcgtggtgtcacgctcgtcgtttggtatggcttcattcagctccggttcccaacgatcaaggcgagttacatgatcccccatgttgtgcaaaaaagcggttagctccttcggtcctccgatcgttgtcagaagtaagttggccgcagtgttatcactcatggttatggcagcactgcataattctcttactgtcatgccatccgtaagatgcttttctgtgactggtgagtactcaaccaagtcattctgagaatagtgtatgcggcgac

SEQ ID NO: 131 - DNA, 5678 bp, Artificial sequence
  Synthetic sequence
cgagttgctcttgcccggcgtcaatacgggataataccgcgccacatagcagaactttaaaagtgctcatcattggaaaacgttcttcggggcgaaaactctcaaggatcttaccgctgttgagatccagttcgatgtaacccactcgtgcacccaactgatcttcagcatcttttactttcaccagcgtttctgggtgagcaaaaacaggaaggcaaaatgccgcaaaaaagggaataagggcgacacggaaatgttgaatactcatactcttcctttttcaatcatggccgcgggattaaaagtcggggattggtgaacaaaaaggtgtttctctctttaagagaaatatcgttttgctaaacagttgatattgaggtatcattttatcgtaaaagacatttttgctcaacaattgcttgacggaaatcaacaaattttagcattttgtaaaaaagtcgctatataatttggtgaattggagttattttcatatttttgcatcccgaagagtttctcttaaagagagaaacatcttttgcataccttttccgaccgaatttttatgtcgtaaagaggggctttgcagggggtggactcagaaagatgagaatagatgactattgtagttgaaacacatagaaagttgctgatatacagaccgatacgcatatcgggatgaaccatgagtacgttcttttctcaaaaaacataaatattcgaaaagagatgcaataaattaaggagaggttataatgaacaaagtaaatataaaagatagtcaaaattttattacttcaaaatatcacatagaaaaaataatgaattgcataagtttagatgaaaaagataacatctttgaaataggtgcagggaaaggtcattttactgctggattggtaaagagatgtaattttgtaacggcgatagaaattgattctaaattatgtgaggtaactcgtaataagctcttaaattatcctaactatcaaatagtaaatgatgatatactgaaatttacatttcctagccacaatccatataaaatatttggcagcataccttacaacataagcacaaatataattcgaaaaattgtttttgaaagttcagccacaataagttatttaatagtggaatatggttttgctaaaatgttattagatacaaacagatcactagcattgctgttaatggcagaggtagatatttctatattagcaaaaattcctaggtattatttccatccaaaacctaaagtggatagcacattaattgtattaaaaagaaagccagcaaaaatggcatttaaagagagaaaaaaatatgaaacttttgtaatgaaatgggttaacaaagagtacgaaaaactgtttacaaaaaatcaatttaataaagctttaaaacatgcgagaatatatgatataaacaatattagtttcgaacaatttgtatcgctatttaatagttataaaatatttaacggctaaaaacaataggccacatgcaactgtaaatgtttacgcgggtaccgacaccgcggtggaggggaattcccatgtcagccgttaagtgttcctgtgtcactcaaaattgctttgagaggctctaagggcttctcagtgcgttacatccctggcttgttgtccacaaccgttaaaccttaaaagctttaaaagccttatatattcttttttttcttataaaacttaaaaccttagaggctatttaagttgctgatttatattaattttattgttcaaacatgagagcttagtacgtgaaacatgagagcttagtacgttagccatgagagcttagtacgttagccatgagggtttagttcgttaaacatgagagcttagtacgttaaacatgagagcttagtacgtgaaacatgagagcttagtacgtactatcaacaggttgaactgctgatcttcagatcctctacgccggacgcatcgtggccggatcaattccgttttccgctgcataaccctgcttcggggtcattatagcgattttttcggtatatccatcctttttcgcacgatatacaggattttgccaaagggttcgtgtagactttccttggtgtatccaacggcgtcagccgggcaggataggtgaagtaggcccacccgcgagcgggtgttccttcttcactgtcccttattcgcacctggcggtgctcaacgggaatcctgctctgcgaggctggccggctaccgccggcgtaacagatgagggcaagcggatggctgatgaaaccaagccaaccaggaagggcagcccacctatcacggaattgatccccctcgaattggaattcgttccgtctcgattcagatctaaaggatccaatctagataaaacgaaaggctcagtcgaaagactgggcctttcgttttacaattgggctaccttttttttgttttgtttgcaatggttaatctattgttaaaatttaaagtttcacttgaactttcaaataatgttcttatatgtgcagtgtcgaaagaaacaaagtaggactgatcgtccatcaatttaaaatttaaaataatggtttttactctggaagattttgttggcgattggcgtcagaccgcgggttataatttggatcaagtcctggaacagggtggcgtaagctctctgttccagaacctgggtgtgagcgtgacgccgattcagcgcatcgttctgtccggcgagaacggtctgaaaattgatattcatgtgatcatcccgtacgaaggcctgagcggtgaccaaatgggtcaaatcgagaaaatctttaaagtcgtctacccagttgacgatcaccacttcaaggttatcttgcattacggtacgctggtgattgatggtgtgaccccgaatatgattgactatttcggccgtccgtatgaaggcattgccgtttttgacggtaaaaagatcaccgtcaccggtaccctgtggaatggcaataagattattgacgagcgtctgattaacccggacggcagcctgctgttccgcgtgaccatcaacggtgtcacgggttggcgtctgtgcgagcgcatcctggcataaatcctagctgattagctcgagaaggccatcctgacggatggccttttttttgtatcgagacgactagtgtaattgcctatcttccagtgatggaacagcatttgtgcattggctgcaacaatcagccttacttgtgcctgttctatttccgaaccgaccgcttgtatgaatccatcaaaattcgttttctctatgttggattccttgttgctcatattgtgatgataatttctacaaatatagtcattggtaactatctatgaaactgtttgatacttttatagttgattaaacttgttcatggcatttgccttaatatcatccgctatgtcaatgtagggtttcatagctttgtagtcgctgtgtcccgtccatttcatgaccacctgtgccgggattccgagagccagcgcattgcagatgaatgtccttcttcctgcatgggtactgagcaaagcgtatttgggtgtgacttcatcaatacgttcatttcccttgtagtaggtttcccgtacaggctcgttgatttctgccagttcgcccagctctttcaggtaatcgttcatcttctggttgctgatgacgggcagagccatgtaattctcgaaatggatgtccttgtatttgtccagtatggctttgctgtatttgttcagttcaatcgtcaggctgtcggcagtcttgactgtggttatttcgatgtggtcggacttcacatcgcttcttttcagattgcgaacatccgaataccgcaaactcgtaaagcagcagaacaggaaaacatcacgcacacgttccaggtattgcttatccttgggtatctggtagtctttcagcttgttcagttcatcccaagtcaggaagattacttttttcgaggtggttttcagtttcggtttgaacgtatcgtatgcaatgttctgatgatgtcctttcttgaagctccagcgcaggaaccatttgaggaatcccatttgcttgccgatggtgctgtttctcatatccttggtgtcacgcaggaagttgacgtattcgttcaatccaaactcgttgaaatagttgaacgttgcatcctccttgaactctttgaggtggttcctcactgctgcaaatttttcataggtggatgccgtccagttattctggttaccgcactcttttacaaactcatcgaacacctcccaaaagctgacaggggcttcttccggctgttcttcgctggtgtctttcattctcatgttgaaagcttccttcaactgttgggtcgttggcatgacctcctgcacctcaaattccttgaaaatattctggatttcggcatagtatttcagcaagtccgtattgatttcggctgcactttgctttagcttgttggtacatccgctctttacccgctgcttatctgcatcccatttggctacgtcaatccggtagcccgttgtaaactcgatgcgttggctggcaaagatgacacgcatacggatgggtacgttctctacgattggcacaccgttctttttccggctctccaatgcaaaaatgatgttgcgcttgatattcataattgggtgcgtttgaaattctacacccaaatatacacccaattattgagatagcaaaagacatttagaaacatttacttttactctatattgtaatttacacttgattatcagtcgtttgcagtcttatgatattctgtgaaagtataagttcgagagcctgtctctccgcaaaaaacgctgaaaatcagcagattgcaaaacaaacaccctgttttacacccaagaatgtaaagtcggctgtttttgttttatttaagataatacaaccactacataataaaagagtagcgatattaaaagaatccgatgagaaaagactaatatttatctatccattcagtttgatttttcaggactttacatcgtcctgaaagtatttgttggtaccgaggacgcgacagctgcagacgcgttatgagtaaacttggtctgacagttaccaatgcttaatcagtgaggcacctatctcagcgatctgtctatttcgttcatccatagttgcctgactccccgtcgtgtagataactacgatacgggagggcttaccatctggccccagtgctgcaatgataccgcgggacccacgctcaccggctccagatttatcagcaataaaccagccagccggaagggccgagcgcagaagtggtcctgcaactttatccgcctccatccagtctattaattgttgccgggaagctagagtaagtagttcgccagttaatagtttgcgcaacgttgttgccattgctacaggcatcgtggtgtcacgctcgtcgtttggtatggcttcattcagctccggttcccaacgatcaaggcgagttacatgatcccccatgttgtgcaaaaaagcggttagctccttcggtcctccgatcgttgtcagaagtaagttggccgcagtgttatcactcatggttatggcagcactgcataattctcttactgtcatgccatccgtaagatgcttttctgtgactggtgagtactcaaccaagtcattctgagaatagtgtatgcggcgac

SEQ ID NO: 132 - DNA, 5678 bp, Artificial sequence
  Synthetic sequence
cgagttgctcttgcccggcgtcaatacgggataataccgcgccacatagcagaactttaaaagtgctcatcattggaaaacgttcttcggggcgaaaactctcaaggatcttaccgctgttgagatccagttcgatgtaacccactcgtgcacccaactgatcttcagcatcttttactttcaccagcgtttctgggtgagcaaaaacaggaaggcaaaatgccgcaaaaaagggaataagggcgacacggaaatgttgaatactcatactcttcctttttcaatcatggccgcgggattaaaagtcggggattggtgaacaaaaaggtgtttctctctttaagagaaatatcgttttgctaaacagttgatattgaggtatcattttatcgtaaaagacatttttgctcaacaattgcttgacggaaatcaacaaattttagcattttgtaaaaaagtcgctatataatttggtgaattggagttattttcatatttttgcatcccgaagagtttctcttaaagagagaaacatcttttgcataccttttccgaccgaatttttatgtcgtaaagaggggctttgcagggggtggactcagaaagatgagaatagatgactattgtagttgaaacacatagaaagttgctgatatacagaccgatacgcatatcgggatgaaccatgagtacgttcttttctcaaaaaacataaatattcgaaaagagatgcaataaattaaggagaggttataatgaacaaagtaaatataaaagatagtcaaaattttattacttcaaaatatcacatagaaaaaataatgaattgcataagtttagatgaaaaagataacatctttgaaataggtgcagggaaaggtcattttactgctggattggtaaagagatgtaattttgtaacggcgatagaaattgattctaaattatgtgaggtaactcgtaataagctcttaaattatcctaactatcaaatagtaaatgatgatatactgaaatttacatttcctagccacaatccatataaaatatttggcagcataccttacaacataagcacaaatataattcgaaaaattgtttttgaaagttcagccacaataagttatttaatagtggaatatggttttgctaaaatgttattagatacaaacagatcactagcattgctgttaatggcagaggtagatatttctatattagcaaaaattcctaggtattatttccatccaaaacctaaagtggatagcacattaattgtattaaaaagaaagccagcaaaaatggcatttaaagagagaaaaaaatatgaaacttttgtaatgaaatgggttaacaaagagtacgaaaaactgtttacaaaaaatcaatttaataaagctttaaaacatgcgagaatatatgatataaacaatattagtttcgaacaatttgtatcgctatttaatagttataaaatatttaacggctaaaaacaataggccacatgcaactgtaaatgtttacgcgggtaccgacaccgcggtggaggggaattcccatgtcagccgttaagtgttcctgtgtcactcaaaattgctttgagaggctctaagggcttctcagtgcgttacatccctggcttgttgtccacaaccgttaaaccttaaaagctttaaaagccttatatattcttttttttcttataaaacttaaaaccttagaggctatttaagttgctgatttatattaattttattgttcaaacatgagagcttagtacgtgaaacatgagagcttagtacgttagccatgagagcttagtacgttagccatgagggtttagttcgttaaacatgagagcttagtacgttaaacatgagagcttagtacgtgaaacatgagagcttagtacgtactatcaacaggttgaactgctgatcttcagatcctctacgccggacgcatcgtggccggatcaattccgttttccgctgcataaccctgcttcggggtcattatagcgattttttcggtatatccatcctttttcgcacgatatacaggattttgccaaagggttcgtgtagactttccttggtgtatccaacggcgtcagccgggcaggataggtgaagtaggcccacccgcgagcgggtgttccttcttcactgtcccttattcgcacctggcggtgctcaacgggaatcctgctctgcgaggctggccggctaccgccggcgtaacagatgagggcaagcggatggctgatgaaaccaagccaaccaggaagggcagcccacctatcacggaattgatccccctcgaattggaattcgttccgtctcgattcagatctaaaggatccaatctagataaaacgaaaggctcagtcgaaagactgggcctttcgttttacaattgggctaccttttttttgttttgtttgcaatggttaatctattgttaacatttaaagtttcacttgaactttcaaataatgttcttatattttcagtgtcgaaagaaacaaagtaggactgatcgtccatcaatttaaaatttaaaataatggtttttactctggaagattttgttggcgattggcgtcagaccgcgggttataatttggatcaagtcctggaacagggtggcgtaagctctctgttccagaacctgggtgtgagcgtgacgccgattcagcgcatcgttctgtccggcgagaacggtctgaaaattgatattcatgtgatcatcccgtacgaaggcctgagcggtgaccaaatgggtcaaatcgagaaaatctttaaagtcgtctacccagttgacgatcaccacttcaaggttatcttgcattacggtacgctggtgattgatggtgtgaccccgaatatgattgactatttcggccgtccgtatgaaggcattgccgtttttgacggtaaaaagatcaccgtcaccggtaccctgtggaatggcaataagattattgacgagcgtctgattaacccggacggcagcctgctgttccgcgtgaccatcaacggtgtcacgggttggcgtctgtgcgagcgcatcctggcataaatcctagctgattagctcgagaaggccatcctgacggatggccttttttttgtatcgagacgactagtgtaattgcctatcttccagtgatggaacagcatttgtgcattggctgcaacaatcagccttacttgtgcctgttctatttccgaaccgaccgcttgtatgaatccatcaaaattcgttttctctatgttggattccttgttgctcatattgtgatgataatttctacaaatatagtcattggtaactatctatgaaactgtttgatacttttatagttgattaaacttgttcatggcatttgccttaatatcatccgctatgtcaatgtagggtttcatagctttgtagtcgctgtgtcccgtccatttcatgaccacctgtgccgggattccgagagccagcgcattgcagatgaatgtccttcttcctgcatgggtactgagcaaagcgtatttgggtgtgacttcatcaatacgttcatttcccttgtagtaggtttcccgtacaggctcgttgatttctgccagttcgcccagctctttcaggtaatcgttcatcttctggttgctgatgacgggcagagccatgtaattctcgaaatggatgtccttgtatttgtccagtatggctttgctgtatttgttcagttcaatcgtcaggctgtcggcagtcttgactgtggttatttcgatgtggtcggacttcacatcgcttcttttcagattgcgaacatccgaataccgcaaactcgtaaagcagcagaacaggaaaacatcacgcacacgttccaggtattgcttatccttgggtatctggtagtctttcagcttgttcagttcatcccaagtcaggaagattacttttttcgaggtggttttcagtttcggtttgaacgtatcgtatgcaatgttctgatgatgtcctttcttgaagctccagcgcaggaaccatttgaggaatcccatttgcttgccgatggtgctgtttctcatatccttggtgtcacgcaggaagttgacgtattcgttcaatccaaactcgttgaaatagttgaacgttgcatcctccttgaactctttgaggtggttcctcactgctgcaaatttttcataggtggatgccgtccagttattctggttaccgcactcttttacaaactcatcgaacacctcccaaaagctgacaggggcttcttccggctgttcttcgctggtgtctttcattctcatgttgaaagcttccttcaactgttgggtcgttggcatgacctcctgcacctcaaattccttgaaaatattctggatttcggcatagtatttcagcaagtccgtattgatttcggctgcactttgctttagcttgttggtacatccgctctttacccgctgcttatctgcatcccatttggctacgtcaatccggtagcccgttgtaaactcgatgcgttggctggcaaagatgacacgcatacggatgggtacgttctctacgattggcacaccgttctttttccggctctccaatgcaaaaatgatgttgcgcttgatattcataattgggtgcgtttgaaattctacacccaaatatacacccaattattgagatagcaaaagacatttagaaacatttacttttactctatattgtaatttacacttgattatcagtcgtttgcagtcttatgatattctgtgaaagtataagttcgagagcctgtctctccgcaaaaaacgctgaaaatcagcagattgcaaaacaaacaccctgttttacacccaagaatgtaaagtcggctgtttttgttttatttaagataatacaaccactacataataaaagagtagcgatattaaaagaatccgatgagaaaagactaatatttatctatccattcagtttgatttttcaggactttacatcgtcctgaaagtatttgttggtaccgaggacgcgacagctgcagacgcgttatgagtaaacttggtctgacagttaccaatgcttaatcagtgaggcacctatctcagcgatctgtctatttcgttcatccatagttgcctgactccccgtcgtgtagataactacgatacgggagggcttaccatctggccccagtgctgcaatgataccgcgggacccacgctcaccggctccagatttatcagcaataaaccagccagccggaagggccgagcgcagaagtggtcctgcaactttatccgcctccatccagtctattaattgttgccgggaagctagagtaagtagttcgccagttaatagtttgcgcaacgttgttgccattgctacaggcatcgtggtgtcacgctcgtcgtttggtatggcttcattcagctccggttcccaacgatcaaggcgagttacatgatcccccatgttgtgcaaaaaagcggttagctccttcggtcctccgatcgttgtcagaagtaagttggccgcagtgttatcactcatggttatggcagcactgcataattctcttactgtcatgccatccgtaagatgcttttctgtgactggtgagtactcaaccaagtcattctgagaatagtgtatgcggcgac

SEQ ID NO: 133 - DNA, 5678 bp, Artificial sequence
  Synthetic sequence
cgagttgctcttgcccggcgtcaatacgggataataccgcgccacatagcagaactttaaaagtgctcatcattggaaaacgttcttcggggcgaaaactctcaaggatcttaccgctgttgagatccagttcgatgtaacccactcgtgcacccaactgatcttcagcatcttttactttcaccagcgtttctgggtgagcaaaaacaggaaggcaaaatgccgcaaaaaagggaataagggcgacacggaaatgttgaatactcatactcttcctttttcaatcatggccgcgggattaaaagtcggggattggtgaacaaaaaggtgtttctctctttaagagaaatatcgttttgctaaacagttgatattgaggtatcattttatcgtaaaagacatttttgctcaacaattgcttgacggaaatcaacaaattttagcattttgtaaaaaagtcgctatataatttggtgaattggagttattttcatatttttgcatcccgaagagtttctcttaaagagagaaacatcttttgcataccttttccgaccgaatttttatgtcgtaaagaggggctttgcagggggtggactcagaaagatgagaatagatgactattgtagttgaaacacatagaaagttgctgatatacagaccgatacgcatatcgggatgaaccatgagtacgttcttttctcaaaaaacataaatattcgaaaagagatgcaataaattaaggagaggttataatgaacaaagtaaatataaaagatagtcaaaattttattacttcaaaatatcacatagaaaaaataatgaattgcataagtttagatgaaaaagataacatctttgaaataggtgcagggaaaggtcattttactgctggattggtaaagagatgtaattttgtaacggcgatagaaattgattctaaattatgtgaggtaactcgtaataagctcttaaattatcctaactatcaaatagtaaatgatgatatactgaaatttacatttcctagccacaatccatataaaatatttggcagcataccttacaacataagcacaaatataattcgaaaaattgtttttgaaagttcagccacaataagttatttaatagtggaatatggttttgctaaaatgttattagatacaaacagatcactagcattgctgttaatggcagaggtagatatttctatattagcaaaaattcctaggtattatttccatccaaaacctaaagtggatagcacattaattgtattaaaaagaaagccagcaaaaatggcatttaaagagagaaaaaaatatgaaacttttgtaatgaaatgggttaacaaagagtacgaaaaactgtttacaaaaaatcaatttaataaagctttaaaacatgcgagaatatatgatataaacaatattagtttcgaacaatttgtatcgctatttaatagttataaaatatttaacggctaaaaacaataggccacatgcaactgtaaatgtttacgcgggtaccgacaccgcggtggaggggaattcccatgtcagccgttaagtgttcctgtgtcactcaaaattgctttgagaggctctaagggcttctcagtgcgttacatccctggcttgttgtccacaaccgttaaaccttaaaagctttaaaagccttatatattcttttttttcttataaaacttaaaaccttagaggctatttaagttgctgatttatattaattttattgttcaaacatgagagcttagtacgtgaaacatgagagcttagtacgttagccatgagagcttagtacgttagccatgagggtttagttcgttaaacatgagagcttagtacgttaaacatgagagcttagtacgtgaaacatgagagcttagtacgtactatcaacaggttgaactgctgatcttcagatcctctacgccggacgcatcgtggccggatcaattccgttttccgctgcataaccctgcttcggggtcattatagcgattttttcggtatatccatcctttttcgcacgatatacaggattttgccaaagggttcgtgtagactttccttggtgtatccaacggcgtcagccgggcaggataggtgaagtaggcccacccgcgagcgggtgttccttcttcactgtcccttattcgcacctggcggtgctcaacgggaatcctgctctgcgaggctggccggctaccgccggcgtaacagatgagggcaagcggatggctgatgaaaccaagccaaccaggaagggcagcccacctatcacggaattgatccccctcgaattggaattcgttccgtctcgattcagatctaaaggatccaatctagataaaacgaaaggctcagtcgaaagactgggcctttcgttttacaattgggctaccttttttttgttttgtttgcaatggttaatctattgttaaaatttaaagtttcacttgaactttcaaataatgttcttctatttgcagtgtcgaaagaaacaaagtaggactgatcgtccatcaatttaaaatttaaaataatggtttttactctggaagattttgttggcgattggcgtcagaccgcgggttataatttggatcaagtcctggaacagggtggcgtaagctctctgttccagaacctgggtgtgagcgtgacgccgattcagcgcatcgttctgtccggcgagaacggtctgaaaattgatattcatgtgatcatcccgtacgaaggcctgagcggtgaccaaatgggtcaaatcgagaaaatctttaaagtcgtctacccagttgacgatcaccacttcaaggttatcttgcattacggtacgctggtgattgatggtgtgaccccgaatatgattgactatttcggccgtccgtatgaaggcattgccgtttttgacggtaaaaagatcaccgtcaccggtaccctgtggaatggcaataagattattgacgagcgtctgattaacccggacggcagcctgctgttccgcgtgaccatcaacggtgtcacgggttggcgtctgtgcgagcgcatcctggcataaatcctagctgattagctcgagaaggccatcctgacggatggccttttttttgtatcgagacgactagtgtaattgcctatcttccagtgatggaacagcatttgtgcattggctgcaacaatcagccttacttgtgcctgttctatttccgaaccgaccgcttgtatgaatccatcaaaattcgttttctctatgttggattccttgttgctcatattgtgatgataatttctacaaatatagtcattggtaactatctatgaaactgtttgatacttttatagttgattaaacttgttcatggcatttgccttaatatcatccgctatgtcaatgtagggtttcatagctttgtagtcgctgtgtcccgtccatttcatgaccacctgtgccgggattccgagagccagcgcattgcagatgaatgtccttcttcctgcatgggtactgagcaaagcgtatttgggtgtgacttcatcaatacgttcatttcccttgtagtaggtttcccgtacaggctcgttgatttctgccagttcgcccagctctttcaggtaatcgttcatcttctggttgctgatgacgggcagagccatgtaattctcgaaatggatgtccttgtatttgtccagtatggctttgctgtatttgttcagttcaatcgtcaggctgtcggcagtcttgactgtggttatttcgatgtggtcggacttcacatcgcttcttttcagattgcgaacatccgaataccgcaaactcgtaaagcagcagaacaggaaaacatcacgcacacgttccaggtattgcttatccttgggtatctggtagtctttcagcttgttcagttcatcccaagtcaggaagattacttttttcgaggtggttttcagtttcggtttgaacgtatcgtatgcaatgttctgatgatgtcctttcttgaagctccagcgcaggaaccatttgaggaatcccatttgcttgccgatggtgctgtttctcatatccttggtgtcacgcaggaagttgacgtattcgttcaatccaaactcgttgaaatagttgaacgttgcatcctccttgaactctttgaggtggttcctcactgctgcaaatttttcataggtggatgccgtccagttattctggttaccgcactcttttacaaactcatcgaacacctcccaaaagctgacaggggcttcttccggctgttcttcgctggtgtctttcattctcatgttgaaagcttccttcaactgttgggtcgttggcatgacctcctgcacctcaaattccttgaaaatattctggatttcggcatagtatttcagcaagtccgtattgatttcggctgcactttgctttagcttgttggtacatccgctctttacccgctgcttatctgcatcccatttggctacgtcaatccggtagcccgttgtaaactcgatgcgttggctggcaaagatgacacgcatacggatgggtacgttctctacgattggcacaccgttctttttccggctctccaatgcaaaaatgatgttgcgcttgatattcataattgggtgcgtttgaaattctacacccaaatatacacccaattattgagatagcaaaagacatttagaaacatttacttttactctatattgtaatttacacttgattatcagtcgtttgcagtcttatgatattctgtgaaagtataagttcgagagcctgtctctccgcaaaaaacgctgaaaatcagcagattgcaaaacaaacaccctgttttacacccaagaatgtaaagtcggctgtttttgttttatttaagataatacaaccactacataataaaagagtagcgatattaaaagaatccgatgagaaaagactaatatttatctatccattcagtttgatttttcaggactttacatcgtcctgaaagtatttgttggtaccgaggacgcgacagctgcagacgcgttatgagtaaacttggtctgacagttaccaatgcttaatcagtgaggcacctatctcagcgatctgtctatttcgttcatccatagttgcctgactccccgtcgtgtagataactacgatacgggagggcttaccatctggccccagtgctgcaatgataccgcgggacccacgctcaccggctccagatttatcagcaataaaccagccagccggaagggccgagcgcagaagtggtcctgcaactttatccgcctccatccagtctattaattgttgccgggaagctagagtaagtagttcgccagttaatagtttgcgcaacgttgttgccattgctacaggcatcgtggtgtcacgctcgtcgtttggtatggcttcattcagctccggttcccaacgatcaaggcgagttacatgatcccccatgttgtgcaaaaaagcggttagctccttcggtcctccgatcgttgtcagaagtaagttggccgcagtgttatcactcatggttatggcagcactgcataattctcttactgtcatgccatccgtaagatgcttttctgtgactggtgagtactcaaccaagtcattctgagaatagtgtatgcggcgac

SEQ ID NO: 134 - DNA, 5678 bp, Artificial sequence
  Synthetic sequence
cgagttgctcttgcccggcgtcaatacgggataataccgcgccacatagcagaactttaaaagtgctcatcattggaaaacgttcttcggggcgaaaactctcaaggatcttaccgctgttgagatccagttcgatgtaacccactcgtgcacccaactgatcttcagcatcttttactttcaccagcgtttctgggtgagcaaaaacaggaaggcaaaatgccgcaaaaaagggaataagggcgacacggaaatgttgaatactcatactcttcctttttcaatcatggccgcgggattaaaagtcggggattggtgaacaaaaaggtgtttctctctttaagagaaatatcgttttgctaaacagttgatattgaggtatcattttatcgtaaaagacatttttgctcaacaattgcttgacggaaatcaacaaattttagcattttgtaaaaaagtcgctatataatttggtgaattggagttattttcatatttttgcatcccgaagagtttctcttaaagagagaaacatcttttgcataccttttccgaccgaatttttatgtcgtaaagaggggctttgcagggggtggactcagaaagatgagaatagatgactattgtagttgaaacacatagaaagttgctgatatacagaccgatacgcatatcgggatgaaccatgagtacgttcttttctcaaaaaacataaatattcgaaaagagatgcaataaattaaggagaggttataatgaacaaagtaaatataaaagatagtcaaaattttattacttcaaaatatcacatagaaaaaataatgaattgcataagtttagatgaaaaagataacatctttgaaataggtgcagggaaaggtcattttactgctggattggtaaagagatgtaattttgtaacggcgatagaaattgattctaaattatgtgaggtaactcgtaataagctcttaaattatcctaactatcaaatagtaaatgatgatatactgaaatttacatttcctagccacaatccatataaaatatttggcagcataccttacaacataagcacaaatataattcgaaaaattgtttttgaaagttcagccacaataagttatttaatagtggaatatggttttgctaaaatgttattagatacaaacagatcactagcattgctgttaatggcagaggtagatatttctatattagcaaaaattcctaggtattatttccatccaaaacctaaagtggatagcacattaattgtattaaaaagaaagccagcaaaaatggcatttaaagagagaaaaaaatatgaaacttttgtaatgaaatgggttaacaaagagtacgaaaaactgtttacaaaaaatcaatttaataaagctttaaaacatgcgagaatatatgatataaacaatattagtttcgaacaatttgtatcgctatttaatagttataaaatatttaacggctaaaaacaataggccacatgcaactgtaaatgtttacgcgggtaccgacaccgcggtggaggggaattcccatgtcagccgttaagtgttcctgtgtcactcaaaattgctttgagaggctctaagggcttctcagtgcgttacatccctggcttgttgtccacaaccgttaaaccttaaaagctttaaaagccttatatattcttttttttcttataaaacttaaaaccttagaggctatttaagttgctgatttatattaattttattgttcaaacatgagagcttagtacgtgaaacatgagagcttagtacgttagccatgagagcttagtacgttagccatgagggtttagttcgttaaacatgagagcttagtacgttaaacatgagagcttagtacgtgaaacatgagagcttagtacgtactatcaacaggttgaactgctgatcttcagatcctctacgccggacgcatcgtggccggatcaattccgttttccgctgcataaccctgcttcggggtcattatagcgattttttcggtatatccatcctttttcgcacgatatacaggattttgccaaagggttcgtgtagactttccttggtgtatccaacggcgtcagccgggcaggataggtgaagtaggcccacccgcgagcgggtgttccttcttcactgtcccttattcgcacctggcggtgctcaacgggaatcctgctctgcgaggctggccggctaccgccggcgtaacagatgagggcaagcggatggctgatgaaaccaagccaaccaggaagggcagcccacctatcacggaattgatccccctcgaattggaattcgttccgtctcgattcagatctaaaggatccaatctagataaaacgaaaggctcagtcgaaagactgggcctttcgttttacaattgggctaccttttttttgttttgtttgcaatggttaatctattgttaaaatttaaagtttcacttgaactttcaaataatgttcttatatttccagtgtcgaaagaaacaaagtaggactgatcgtccatcaatttaaaatttaaaataatggtttttactctggaagattttgttggcgattggcgtcagaccgcgggttataatttggatcaagtcctggaacagggtggcgtaagctctctgttccagaacctgggtgtgagcgtgacgccgattcagcgcatcgttctgtccggcgagaacggtctgaaaattgatattcatgtgatcatcccgtacgaaggcctgagcggtgaccaaatgggtcaaatcgagaaaatctttaaagtcgtctacccagttgacgatcaccacttcaaggttatcttgcattacggtacgctggtgattgatggtgtgaccccgaatatgattgactatttcggccgtccgtatgaaggcattgccgtttttgacggtaaaaagatcaccgtcaccggtaccctgtggaatggcaataagattattgacgagcgtctgattaacccggacggcagcctgctgttccgcgtgaccatcaacggtgtcacgggttggcgtctgtgcgagcgcatcctggcataaatcctagctgattagctcgagaaggccatcctgacggatggccttttttttgtatcgagacgactagtgtaattgcctatcttccagtgatggaacagcatttgtgcattggctgcaacaatcagccttacttgtgcctgttctatttccgaaccgaccgcttgtatgaatccatcaaaattcgttttctctatgttggattccttgttgctcatattgtgatgataatttctacaaatatagtcattggtaactatctatgaaactgtttgatacttttatagttgattaaacttgttcatggcatttgccttaatatcatccgctatgtcaatgtagggtttcatagctttgtagtcgctgtgtcccgtccatttcatgaccacctgtgccgggattccgagagccagcgcattgcagatgaatgtccttcttcctgcatgggtactgagcaaagcgtatttgggtgtgacttcatcaatacgttcatttcccttgtagtaggtttcccgtacaggctcgttgatttctgccagttcgcccagctctttcaggtaatcgttcatcttctggttgctgatgacgggcagagccatgtaattctcgaaatggatgtccttgtatttgtccagtatggctttgctgtatttgttcagttcaatcgtcaggctgtcggcagtcttgactgtggttatttcgatgtggtcggacttcacatcgcttcttttcagattgcgaacatccgaataccgcaaactcgtaaagcagcagaacaggaaaacatcacgcacacgttccaggtattgcttatccttgggtatctggtagtctttcagcttgttcagttcatcccaagtcaggaagattacttttttcgaggtggttttcagtttcggtttgaacgtatcgtatgcaatgttctgatgatgtcctttcttgaagctccagcgcaggaaccatttgaggaatcccatttgcttgccgatggtgctgtttctcatatccttggtgtcacgcaggaagttgacgtattcgttcaatccaaactcgttgaaatagttgaacgttgcatcctccttgaactctttgaggtggttcctcactgctgcaaatttttcataggtggatgccgtccagttattctggttaccgcactcttttacaaactcatcgaacacctcccaaaagctgacaggggcttcttccggctgttcttcgctggtgtctttcattctcatgttgaaagcttccttcaactgttgggtcgttggcatgacctcctgcacctcaaattccttgaaaatattctggatttcggcatagtatttcagcaagtccgtattgatttcggctgcactttgctttagcttgttggtacatccgctctttacccgctgcttatctgcatcccatttggctacgtcaatccggtagcccgttgtaaactcgatgcgttggctggcaaagatgacacgcatacggatgggtacgttctctacgattggcacaccgttctttttccggctctccaatgcaaaaatgatgttgcgcttgatattcataattgggtgcgtttgaaattctacacccaaatatacacccaattattgagatagcaaaagacatttagaaacatttacttttactctatattgtaatttacacttgattatcagtcgtttgcagtcttatgatattctgtgaaagtataagttcgagagcctgtctctccgcaaaaaacgctgaaaatcagcagattgcaaaacaaacaccctgttttacacccaagaatgtaaagtcggctgtttttgttttatttaagataatacaaccactacataataaaagagtagcgatattaaaagaatccgatgagaaaagactaatatttatctatccattcagtttgatttttcaggactttacatcgtcctgaaagtatttgttggtaccgaggacgcgacagctgcagacgcgttatgagtaaacttggtctgacagttaccaatgcttaatcagtgaggcacctatctcagcgatctgtctatttcgttcatccatagttgcctgactccccgtcgtgtagataactacgatacgggagggcttaccatctggccccagtgctgcaatgataccgcgggacccacgctcaccggctccagatttatcagcaataaaccagccagccggaagggccgagcgcagaagtggtcctgcaactttatccgcctccatccagtctattaattgttgccgggaagctagagtaagtagttcgccagttaatagtttgcgcaacgttgttgccattgctacaggcatcgtggtgtcacgctcgtcgtttggtatggcttcattcagctccggttcccaacgatcaaggcgagttacatgatcccccatgttgtgcaaaaaagcggttagctccttcggtcctccgatcgttgtcagaagtaagttggccgcagtgttatcactcatggttatggcagcactgcataattctcttactgtcatgccatccgtaagatgcttttctgtgactggtgagtactcaaccaagtcattctgagaatagtgtatgcggcgac

SEQ ID NO: 135 - DNA, 5678 bp, Artificial sequence
  Synthetic sequence
cgagttgctcttgcccggcgtcaatacgggataataccgcgccacatagcagaactttaaaagtgctcatcattggaaaacgttcttcggggcgaaaactctcaaggatcttaccgctgttgagatccagttcgatgtaacccactcgtgcacccaactgatcttcagcatcttttactttcaccagcgtttctgggtgagcaaaaacaggaaggcaaaatgccgcaaaaaagggaataagggcgacacggaaatgttgaatactcatactcttcctttttcaatcatggccgcgggattaaaagtcggggattggtgaacaaaaaggtgtttctctctttaagagaaatatcgttttgctaaacagttgatattgaggtatcattttatcgtaaaagacatttttgctcaacaattgcttgacggaaatcaacaaattttagcattttgtaaaaaagtcgctatataatttggtgaattggagttattttcatatttttgcatcccgaagagtttctcttaaagagagaaacatcttttgcataccttttccgaccgaatttttatgtcgtaaagaggggctttgcagggggtggactcagaaagatgagaatagatgactattgtagttgaaacacatagaaagttgctgatatacagaccgatacgcatatcgggatgaaccatgagtacgttcttttctcaaaaaacataaatattcgaaaagagatgcaataaattaaggagaggttataatgaacaaagtaaatataaaagatagtcaaaattttattacttcaaaatatcacatagaaaaaataatgaattgcataagtttagatgaaaaagataacatctttgaaataggtgcagggaaaggtcattttactgctggattggtaaagagatgtaattttgtaacggcgatagaaattgattctaaattatgtgaggtaactcgtaataagctcttaaattatcctaactatcaaatagtaaatgatgatatactgaaatttacatttcctagccacaatccatataaaatatttggcagcataccttacaacataagcacaaatataattcgaaaaattgtttttgaaagttcagccacaataagttatttaatagtggaatatggttttgctaaaatgttattagatacaaacagatcactagcattgctgttaatggcagaggtagatatttctatattagcaaaaattcctaggtattatttccatccaaaacctaaagtggatagcacattaattgtattaaaaagaaagccagcaaaaatggcatttaaagagagaaaaaaatatgaaacttttgtaatgaaatgggttaacaaagagtacgaaaaactgtttacaaaaaatcaatttaataaagctttaaaacatgcgagaatatatgatataaacaatattagtttcgaacaatttgtatcgctatttaatagttataaaatatttaacggctaaaaacaataggccacatgcaactgtaaatgtttacgcgggtaccgacaccgcggtggaggggaattcccatgtcagccgttaagtgttcctgtgtcactcaaaattgctttgagaggctctaagggcttctcagtgcgttacatccctggcttgttgtccacaaccgttaaaccttaaaagctttaaaagccttatatattcttttttttcttataaaacttaaaaccttagaggctatttaagttgctgatttatattaattttattgttcaaacatgagagcttagtacgtgaaacatgagagcttagtacgttagccatgagagcttagtacgttagccatgagggtttagttcgttaaacatgagagcttagtacgttaaacatgagagcttagtacgtgaaacatgagagcttagtacgtactatcaacaggttgaactgctgatcttcagatcctctacgccggacgcatcgtggccggatcaattccgttttccgctgcataaccctgcttcggggtcattatagcgattttttcggtatatccatcctttttcgcacgatatacaggattttgccaaagggttcgtgtagactttccttggtgtatccaacggcgtcagccgggcaggataggtgaagtaggcccacccgcgagcgggtgttccttcttcactgtcccttattcgcacctggcggtgctcaacgggaatcctgctctgcgaggctggccggctaccgccggcgtaacagatgagggcaagcggatggctgatgaaaccaagccaaccaggaagggcagcccacctatcacggaattgatccccctcgaattggaattcgttccgtctcgattcagatctaaaggatccaatctagataaaacgaaaggctcagtcgaaagactgggcctttcgttttacaattgggctaccttttttttgttttgtttgcaatggttaatctattgttgaaatttaaagtttcacttgaactttcaaataatgttcttatatttgcagtgtcgaaagaaacaaagtaggactgatcgtccatcaatttaaaatttaaaataatggtttttactctggaagattttgttggcgattggcgtcagaccgcgggttataatttggatcaagtcctggaacagggtggcgtaagctctctgttccagaacctgggtgtgagcgtgacgccgattcagcgcatcgttctgtccggcgagaacggtctgaaaattgatattcatgtgatcatcccgtacgaaggcctgagcggtgaccaaatgggtcaaatcgagaaaatctttaaagtcgtctacccagttgacgatcaccacttcaaggttatcttgcattacggtacgctggtgattgatggtgtgaccccgaatatgattgactatttcggccgtccgtatgaaggcattgccgtttttgacggtaaaaagatcaccgtcaccggtaccctgtggaatggcaataagattattgacgagcgtctgattaacccggacggcagcctgctgttccgcgtgaccatcaacggtgtcacgggttggcgtctgtgcgagcgcatcctggcataaatcctagctgattagctcgagaaggccatcctgacggatggccttttttttgtatcgagacgactagtgtaattgcctatcttccagtgatggaacagcatttgtgcattggctgcaacaatcagccttacttgtgcctgttctatttccgaaccgaccgcttgtatgaatccatcaaaattcgttttctctatgttggattccttgttgctcatattgtgatgataatttctacaaatatagtcattggtaactatctatgaaactgtttgatacttttatagttgattaaacttgttcatggcatttgccttaatatcatccgctatgtcaatgtagggtttcatagctttgtagtcgctgtgtcccgtccatttcatgaccacctgtgccgggattccgagagccagcgcattgcagatgaatgtccttcttcctgcatgggtactgagcaaagcgtatttgggtgtgacttcatcaatacgttcatttcccttgtagtaggtttcccgtacaggctcgttgatttctgccagttcgcccagctctttcaggtaatcgttcatcttctggttgctgatgacgggcagagccatgtaattctcgaaatggatgtccttgtatttgtccagtatggctttgctgtatttgttcagttcaatcgtcaggctgtcggcagtcttgactgtggttatttcgatgtggtcggacttcacatcgcttcttttcagattgcgaacatccgaataccgcaaactcgtaaagcagcagaacaggaaaacatcacgcacacgttccaggtattgcttatccttgggtatctggtagtctttcagcttgttcagttcatcccaagtcaggaagattacttttttcgaggtggttttcagtttcggtttgaacgtatcgtatgcaatgttctgatgatgtcctttcttgaagctccagcgcaggaaccatttgaggaatcccatttgcttgccgatggtgctgtttctcatatccttggtgtcacgcaggaagttgacgtattcgttcaatccaaactcgttgaaatagttgaacgttgcatcctccttgaactctttgaggtggttcctcactgctgcaaatttttcataggtggatgccgtccagttattctggttaccgcactcttttacaaactcatcgaacacctcccaaaagctgacaggggcttcttccggctgttcttcgctggtgtctttcattctcatgttgaaagcttccttcaactgttgggtcgttggcatgacctcctgcacctcaaattccttgaaaatattctggatttcggcatagtatttcagcaagtccgtattgatttcggctgcactttgctttagcttgttggtacatccgctctttacccgctgcttatctgcatcccatttggctacgtcaatccggtagcccgttgtaaactcgatgcgttggctggcaaagatgacacgcatacggatgggtacgttctctacgattggcacaccgttctttttccggctctccaatgcaaaaatgatgttgcgcttgatattcataattgggtgcgtttgaaattctacacccaaatatacacccaattattgagatagcaaaagacatttagaaacatttacttttactctatattgtaatttacacttgattatcagtcgtttgcagtcttatgatattctgtgaaagtataagttcgagagcctgtctctccgcaaaaaacgctgaaaatcagcagattgcaaaacaaacaccctgttttacacccaagaatgtaaagtcggctgtttttgttttatttaagataatacaaccactacataataaaagagtagcgatattaaaagaatccgatgagaaaagactaatatttatctatccattcagtttgatttttcaggactttacatcgtcctgaaagtatttgttggtaccgaggacgcgacagctgcagacgcgttatgagtaaacttggtctgacagttaccaatgcttaatcagtgaggcacctatctcagcgatctgtctatttcgttcatccatagttgcctgactccccgtcgtgtagataactacgatacgggagggcttaccatctggccccagtgctgcaatgataccgcgggacccacgctcaccggctccagatttatcagcaataaaccagccagccggaagggccgagcgcagaagtggtcctgcaactttatccgcctccatccagtctattaattgttgccgggaagctagagtaagtagttcgccagttaatagtttgcgcaacgttgttgccattgctacaggcatcgtggtgtcacgctcgtcgtttggtatggcttcattcagctccggttcccaacgatcaaggcgagttacatgatcccccatgttgtgcaaaaaagcggttagctccttcggtcctccgatcgttgtcagaagtaagttggccgcagtgttatcactcatggttatggcagcactgcataattctcttactgtcatgccatccgtaagatgcttttctgtgactggtgagtactcaaccaagtcattctgagaatagtgtatgcggcgac

SEQ ID NO: 136 - DNA, 5678 bp, Artificial sequence
  Synthetic sequence
cgagttgctcttgcccggcgtcaatacgggataataccgcgccacatagcagaactttaaaagtgctcatcattggaaaacgttcttcggggcgaaaactctcaaggatcttaccgctgttgagatccagttcgatgtaacccactcgtgcacccaactgatcttcagcatcttttactttcaccagcgtttctgggtgagcaaaaacaggaaggcaaaatgccgcaaaaaagggaataagggcgacacggaaatgttgaatactcatactcttcctttttcaatcatggccgcgggattaaaagtcggggattggtgaacaaaaaggtgtttctctctttaagagaaatatcgttttgctaaacagttgatattgaggtatcattttatcgtaaaagacatttttgctcaacaattgcttgacggaaatcaacaaattttagcattttgtaaaaaagtcgctatataatttggtgaattggagttattttcatatttttgcatcccgaagagtttctcttaaagagagaaacatcttttgcataccttttccgaccgaatttttatgtcgtaaagaggggctttgcagggggtggactcagaaagatgagaatagatgactattgtagttgaaacacatagaaagttgctgatatacagaccgatacgcatatcgggatgaaccatgagtacgttcttttctcaaaaaacataaatattcgaaaagagatgcaataaattaaggagaggttataatgaacaaagtaaatataaaagatagtcaaaattttattacttcaaaatatcacatagaaaaaataatgaattgcataagtttagatgaaaaagataacatctttgaaataggtgcagggaaaggtcattttactgctggattggtaaagagatgtaattttgtaacggcgatagaaattgattctaaattatgtgaggtaactcgtaataagctcttaaattatcctaactatcaaatagtaaatgatgatatactgaaatttacatttcctagccacaatccatataaaatatttggcagcataccttacaacataagcacaaatataattcgaaaaattgtttttgaaagttcagccacaataagttatttaatagtggaatatggttttgctaaaatgttattagatacaaacagatcactagcattgctgttaatggcagaggtagatatttctatattagcaaaaattcctaggtattatttccatccaaaacctaaagtggatagcacattaattgtattaaaaagaaagccagcaaaaatggcatttaaagagagaaaaaaatatgaaacttttgtaatgaaatgggttaacaaagagtacgaaaaactgtttacaaaaaatcaatttaataaagctttaaaacatgcgagaatatatgatataaacaatattagtttcgaacaatttgtatcgctatttaatagttataaaatatttaacggctaaaaacaataggccacatgcaactgtaaatgtttacgcgggtaccgacaccgcggtggaggggaattcccatgtcagccgttaagtgttcctgtgtcactcaaaattgctttgagaggctctaagggcttctcagtgcgttacatccctggcttgttgtccacaaccgttaaaccttaaaagctttaaaagccttatatattcttttttttcttataaaacttaaaaccttagaggctatttaagttgctgatttatattaattttattgttcaaacatgagagcttagtacgtgaaacatgagagcttagtacgttagccatgagagcttagtacgttagccatgagggtttagttcgttaaacatgagagcttagtacgttaaacatgagagcttagtacgtgaaacatgagagcttagtacgtactatcaacaggttgaactgctgatcttcagatcctctacgccggacgcatcgtggccggatcaattccgttttccgctgcataaccctgcttcggggtcattatagcgattttttcggtatatccatcctttttcgcacgatatacaggattttgccaaagggttcgtgtagactttccttggtgtatccaacggcgtcagccgggcaggataggtgaagtaggcccacccgcgagcgggtgttccttcttcactgtcccttattcgcacctggcggtgctcaacgggaatcctgctctgcgaggctggccggctaccgccggcgtaacagatgagggcaagcggatggctgatgaaaccaagccaaccaggaagggcagcccacctatcacggaattgatccccctcgaattggaattcgttccgtctcgattcagatctaaaggatccaatctagataaaacgaaaggctcagtcgaaagactgggcctttcgttttacaattgggctaccttttttttgttttgtttgcaatggttaatctattgttaaaatttaaagtttcacttgaactttcaaataatgttcttatatttgcagtgtcgaaagaaacaaagtaggactgatcgtccatcaatttaaaatttaaaataatggtttttactctggaagattttgttggcgattggcgtcagaccgcgggttataatttggatcaagtcctggaacagggtggcgtaagctctctgttccagaacctgggtgtgagcgtgacgccgattcagcgcatcgttctgtccggcgagaacggtctgaaaattgatattcatgtgatcatcccgtacgaaggcctgagcggtgaccaaatgggtcaaatcgagaaaatctttaaagtcgtctacccagttgacgatcaccacttcaaggttatcttgcattacggtacgctggtgattgatggtgtgaccccgaatatgattgactatttcggccgtccgtatgaaggcattgccgtttttgacggtaaaaagatcaccgtcaccggtaccctgtggaatggcaataagattattgacgagcgtctgattaacccggacggcagcctgctgttccgcgtgaccatcaacggtgtcacgggttggcgtctgtgcgagcgcatcctggcataaatcctagctgattagctcgagaaggccatcctgacggatggccttttttttgtatcgagacgactagtgtaattgcctatcttccagtgatggaacagcatttgtgcattggctgcaacaatcagccttacttgtgcctgttctatttccgaaccgaccgcttgtatgaatccatcaaaattcgttttctctatgttggattccttgttgctcatattgtgatgataatttctacaaatatagtcattggtaactatctatgaaactgtttgatacttttatagttgattaaacttgttcatggcatttgccttaatatcatccgctatgtcaatgtagggtttcatagctttgtagtcgctgtgtcccgtccatttcatgaccacctgtgccgggattccgagagccagcgcattgcagatgaatgtccttcttcctgcatgggtactgagcaaagcgtatttgggtgtgacttcatcaatacgttcatttcccttgtagtaggtttcccgtacaggctcgttgatttctgccagttcgcccagctctttcaggtaatcgttcatcttctggttgctgatgacgggcagagccatgtaattctcgaaatggatgtccttgtatttgtccagtatggctttgctgtatttgttcagttcaatcgtcaggctgtcggcagtcttgactgtggttatttcgatgtggtcggacttcacatcgcttcttttcagattgcgaacatccgaataccgcaaactcgtaaagcagcagaacaggaaaacatcacgcacacgttccaggtattgcttatccttgggtatctggtagtctttcagcttgttcagttcatcccaagtcaggaagattacttttttcgaggtggttttcagtttcggtttgaacgtatcgtatgcaatgttctgatgatgtcctttcttgaagctccagcgcaggaaccatttgaggaatcccatttgcttgccgatggtgctgtttctcatatccttggtgtcacgcaggaagttgacgtattcgttcaatccaaactcgttgaaatagttgaacgttgcatcctccttgaactctttgaggtggttcctcactgctgcaaatttttcataggtggatgccgtccagttattctggttaccgcactcttttacaaactcatcgaacacctcccaaaagctgacaggggcttcttccggctgttcttcgctggtgtctttcattctcatgttgaaagcttccttcaactgttgggtcgttggcatgacctcctgcacctcaaattccttgaaaatattctggatttcggcatagtatttcagcaagtccgtattgatttcggctgcactttgctttagcttgttggtacatccgctctttacccgctgcttatctgcatcccatttggctacgtcaatccggtagcccgttgtaaactcgatgcgttggctggcaaagatgacacgcatacggatgggtacgttctctacgattggcacaccgttctttttccggctctccaatgcaaaaatgatgttgcgcttgatattcataattgggtgcgtttgaaattctacacccaaatatacacccaattattgagatagcaaaagacatttagaaacatttacttttactctatattgtaatttacacttgattatcagtcgtttgcagtcttatgatattctgtgaaagtataagttcgagagcctgtctctccgcaaaaaacgctgaaaatcagcagattgcaaaacaaacaccctgttttacacccaagaatgtaaagtcggctgtttttgttttatttaagataatacaaccactacataataaaagagtagcgatattaaaagaatccgatgagaaaagactaatatttatctatccattcagtttgatttttcaggactttacatcgtcctgaaagtatttgttggtaccgaggacgcgacagctgcagacgcgttatgagtaaacttggtctgacagttaccaatgcttaatcagtgaggcacctatctcagcgatctgtctatttcgttcatccatagttgcctgactccccgtcgtgtagataactacgatacgggagggcttaccatctggccccagtgctgcaatgataccgcgggacccacgctcaccggctccagatttatcagcaataaaccagccagccggaagggccgagcgcagaagtggtcctgcaactttatccgcctccatccagtctattaattgttgccgggaagctagagtaagtagttcgccagttaatagtttgcgcaacgttgttgccattgctacaggcatcgtggtgtcacgctcgtcgtttggtatggcttcattcagctccggttcccaacgatcaaggcgagttacatgatcccccatgttgtgcaaaaaagcggttagctccttcggtcctccgatcgttgtcagaagtaagttggccgcagtgttatcactcatggttatggcagcactgcataattctcttactgtcatgccatccgtaagatgcttttctgtgactggtgagtactcaaccaagtcattctgagaatagtgtatgcggcgac

SEQ ID NO: 137 - DNA, 5678 bp, Artificial sequence
  Synthetic sequence
cgagttgctcttgcccggcgtcaatacgggataataccgcgccacatagcagaactttaaaagtgctcatcattggaaaacgttcttcggggcgaaaactctcaaggatcttaccgctgttgagatccagttcgatgtaacccactcgtgcacccaactgatcttcagcatcttttactttcaccagcgtttctgggtgagcaaaaacaggaaggcaaaatgccgcaaaaaagggaataagggcgacacggaaatgttgaatactcatactcttcctttttcaatcatggccgcgggattaaaagtcggggattggtgaacaaaaaggtgtttctctctttaagagaaatatcgttttgctaaacagttgatattgaggtatcattttatcgtaaaagacatttttgctcaacaattgcttgacggaaatcaacaaattttagcattttgtaaaaaagtcgctatataatttggtgaattggagttattttcatatttttgcatcccgaagagtttctcttaaagagagaaacatcttttgcataccttttccgaccgaatttttatgtcgtaaagaggggctttgcagggggtggactcagaaagatgagaatagatgactattgtagttgaaacacatagaaagttgctgatatacagaccgatacgcatatcgggatgaaccatgagtacgttcttttctcaaaaaacataaatattcgaaaagagatgcaataaattaaggagaggttataatgaacaaagtaaatataaaagatagtcaaaattttattacttcaaaatatcacatagaaaaaataatgaattgcataagtttagatgaaaaagataacatctttgaaataggtgcagggaaaggtcattttactgctggattggtaaagagatgtaattttgtaacggcgatagaaattgattctaaattatgtgaggtaactcgtaataagctcttaaattatcctaactatcaaatagtaaatgatgatatactgaaatttacatttcctagccacaatccatataaaatatttggcagcataccttacaacataagcacaaatataattcgaaaaattgtttttgaaagttcagccacaataagttatttaatagtggaatatggttttgctaaaatgttattagatacaaacagatcactagcattgctgttaatggcagaggtagatatttctatattagcaaaaattcctaggtattatttccatccaaaacctaaagtggatagcacattaattgtattaaaaagaaagccagcaaaaatggcatttaaagagagaaaaaaatatgaaacttttgtaatgaaatgggttaacaaagagtacgaaaaactgtttacaaaaaatcaatttaataaagctttaaaacatgcgagaatatatgatataaacaatattagtttcgaacaatttgtatcgctatttaatagttataaaatatttaacggctaaaaacaataggccacatgcaactgtaaatgtttacgcgggtaccgacaccgcggtggaggggaattcccatgtcagccgttaagtgttcctgtgtcactcaaaattgctttgagaggctctaagggcttctcagtgcgttacatccctggcttgttgtccacaaccgttaaaccttaaaagctttaaaagccttatatattcttttttttcttataaaacttaaaaccttagaggctatttaagttgctgatttatattaattttattgttcaaacatgagagcttagtacgtgaaacatgagagcttagtacgttagccatgagagcttagtacgttagccatgagggtttagttcgttaaacatgagagcttagtacgttaaacatgagagcttagtacgtgaaacatgagagcttagtacgtactatcaacaggttgaactgctgatcttcagatcctctacgccggacgcatcgtggccggatcaattccgttttccgctgcataaccctgcttcggggtcattatagcgattttttcggtatatccatcctttttcgcacgatatacaggattttgccaaagggttcgtgtagactttccttggtgtatccaacggcgtcagccgggcaggataggtgaagtaggcccacccgcgagcgggtgttccttcttcactgtcccttattcgcacctggcggtgctcaacgggaatcctgctctgcgaggctggccggctaccgccggcgtaacagatgagggcaagcggatggctgatgaaaccaagccaaccaggaagggcagcccacctatcacggaattgatccccctcgaattggaattcgttccgtctcgattcagatctaaaggatccaatctagataaaacgaaaggctcagtcgaaagactgggcctttcgttttacaattgggctaccttttttttgttttgtttgcaatggttaatctattgttaaaatttaaagtttcacttgaactttcaaataatgttcttatatttgcagtgtcgaaagaaacaaagtaggactgatcggcgcgactcacgcgccgatcagtaatggtttttactctggaagattttgttggcgattggcgtcagaccgcgggttataatttggatcaagtcctggaacagggtggcgtaagctctctgttccagaacctgggtgtgagcgtgacgccgattcagcgcatcgttctgtccggcgagaacggtctgaaaattgatattcatgtgatcatcccgtacgaaggcctgagcggtgaccaaatgggtcaaatcgagaaaatctttaaagtcgtctacccagttgacgatcaccacttcaaggttatcttgcattacggtacgctggtgattgatggtgtgaccccgaatatgattgactatttcggccgtccgtatgaaggcattgccgtttttgacggtaaaaagatcaccgtcaccggtaccctgtggaatggcaataagattattgacgagcgtctgattaacccggacggcagcctgctgttccgcgtgaccatcaacggtgtcacgggttggcgtctgtgcgagcgcatcctggcataaatcctagctgattagctcgagaaggccatcctgacggatggccttttttttgtatcgagacgactagtgtaattgcctatcttccagtgatggaacagcatttgtgcattggctgcaacaatcagccttacttgtgcctgttctatttccgaaccgaccgcttgtatgaatccatcaaaattcgttttctctatgttggattccttgttgctcatattgtgatgataatttctacaaatatagtcattggtaactatctatgaaactgtttgatacttttatagttgattaaacttgttcatggcatttgccttaatatcatccgctatgtcaatgtagggtttcatagctttgtagtcgctgtgtcccgtccatttcatgaccacctgtgccgggattccgagagccagcgcattgcagatgaatgtccttcttcctgcatgggtactgagcaaagcgtatttgggtgtgacttcatcaatacgttcatttcccttgtagtaggtttcccgtacaggctcgttgatttctgccagttcgcccagctctttcaggtaatcgttcatcttctggttgctgatgacgggcagagccatgtaattctcgaaatggatgtccttgtatttgtccagtatggctttgctgtatttgttcagttcaatcgtcaggctgtcggcagtcttgactgtggttatttcgatgtggtcggacttcacatcgcttcttttcagattgcgaacatccgaataccgcaaactcgtaaagcagcagaacaggaaaacatcacgcacacgttccaggtattgcttatccttgggtatctggtagtctttcagcttgttcagttcatcccaagtcaggaagattacttttttcgaggtggttttcagtttcggtttgaacgtatcgtatgcaatgttctgatgatgtcctttcttgaagctccagcgcaggaaccatttgaggaatcccatttgcttgccgatggtgctgtttctcatatccttggtgtcacgcaggaagttgacgtattcgttcaatccaaactcgttgaaatagttgaacgttgcatcctccttgaactctttgaggtggttcctcactgctgcaaatttttcataggtggatgccgtccagttattctggttaccgcactcttttacaaactcatcgaacacctcccaaaagctgacaggggcttcttccggctgttcttcgctggtgtctttcattctcatgttgaaagcttccttcaactgttgggtcgttggcatgacctcctgcacctcaaattccttgaaaatattctggatttcggcatagtatttcagcaagtccgtattgatttcggctgcactttgctttagcttgttggtacatccgctctttacccgctgcttatctgcatcccatttggctacgtcaatccggtagcccgttgtaaactcgatgcgttggctggcaaagatgacacgcatacggatgggtacgttctctacgattggcacaccgttctttttccggctctccaatgcaaaaatgatgttgcgcttgatattcataattgggtgcgtttgaaattctacacccaaatatacacccaattattgagatagcaaaagacatttagaaacatttacttttactctatattgtaatttacacttgattatcagtcgtttgcagtcttatgatattctgtgaaagtataagttcgagagcctgtctctccgcaaaaaacgctgaaaatcagcagattgcaaaacaaacaccctgttttacacccaagaatgtaaagtcggctgtttttgttttatttaagataatacaaccactacataataaaagagtagcgatattaaaagaatccgatgagaaaagactaatatttatctatccattcagtttgatttttcaggactttacatcgtcctgaaagtatttgttggtaccgaggacgcgacagctgcagacgcgttatgagtaaacttggtctgacagttaccaatgcttaatcagtgaggcacctatctcagcgatctgtctatttcgttcatccatagttgcctgactccccgtcgtgtagataactacgatacgggagggcttaccatctggccccagtgctgcaatgataccgcgggacccacgctcaccggctccagatttatcagcaataaaccagccagccggaagggccgagcgcagaagtggtcctgcaactttatccgcctccatccagtctattaattgttgccgggaagctagagtaagtagttcgccagttaatagtttgcgcaacgttgttgccattgctacaggcatcgtggtgtcacgctcgtcgtttggtatggcttcattcagctccggttcccaacgatcaaggcgagttacatgatcccccatgttgtgcaaaaaagcggttagctccttcggtcctccgatcgttgtcagaagtaagttggccgcagtgttatcactcatggttatggcagcactgcataattctcttactgtcatgccatccgtaagatgcttttctgtgactggtgagtactcaaccaagtcattctgagaatagtgtatgcggcgac

SEQ ID NO: 138 - DNA, 5678 bp, Artificial sequence
  Synthetic sequence
cgagttgctcttgcccggcgtcaatacgggataataccgcgccacatagcagaactttaaaagtgctcatcattggaaaacgttcttcggggcgaaaactctcaaggatcttaccgctgttgagatccagttcgatgtaacccactcgtgcacccaactgatcttcagcatcttttactttcaccagcgtttctgggtgagcaaaaacaggaaggcaaaatgccgcaaaaaagggaataagggcgacacggaaatgttgaatactcatactcttcctttttcaatcatggccgcgggattaaaagtcggggattggtgaacaaaaaggtgtttctctctttaagagaaatatcgttttgctaaacagttgatattgaggtatcattttatcgtaaaagacatttttgctcaacaattgcttgacggaaatcaacaaattttagcattttgtaaaaaagtcgctatataatttggtgaattggagttattttcatatttttgcatcccgaagagtttctcttaaagagagaaacatcttttgcataccttttccgaccgaatttttatgtcgtaaagaggggctttgcagggggtggactcagaaagatgagaatagatgactattgtagttgaaacacatagaaagttgctgatatacagaccgatacgcatatcgggatgaaccatgagtacgttcttttctcaaaaaacataaatattcgaaaagagatgcaataaattaaggagaggttataatgaacaaagtaaatataaaagatagtcaaaattttattacttcaaaatatcacatagaaaaaataatgaattgcataagtttagatgaaaaagataacatctttgaaataggtgcagggaaaggtcattttactgctggattggtaaagagatgtaattttgtaacggcgatagaaattgattctaaattatgtgaggtaactcgtaataagctcttaaattatcctaactatcaaatagtaaatgatgatatactgaaatttacatttcctagccacaatccatataaaatatttggcagcataccttacaacataagcacaaatataattcgaaaaattgtttttgaaagttcagccacaataagttatttaatagtggaatatggttttgctaaaatgttattagatacaaacagatcactagcattgctgttaatggcagaggtagatatttctatattagcaaaaattcctaggtattatttccatccaaaacctaaagtggatagcacattaattgtattaaaaagaaagccagcaaaaatggcatttaaagagagaaaaaaatatgaaacttttgtaatgaaatgggttaacaaagagtacgaaaaactgtttacaaaaaatcaatttaataaagctttaaaacatgcgagaatatatgatataaacaatattagtttcgaacaatttgtatcgctatttaatagttataaaatatttaacggctaaaaacaataggccacatgcaactgtaaatgtttacgcgggtaccgacaccgcggtggaggggaattcccatgtcagccgttaagtgttcctgtgtcactcaaaattgctttgagaggctctaagggcttctcagtgcgttacatccctggcttgttgtccacaaccgttaaaccttaaaagctttaaaagccttatatattcttttttttcttataaaacttaaaaccttagaggctatttaagttgctgatttatattaattttattgttcaaacatgagagcttagtacgtgaaacatgagagcttagtacgttagccatgagagcttagtacgttagccatgagggtttagttcgttaaacatgagagcttagtacgttaaacatgagagcttagtacgtgaaacatgagagcttagtacgtactatcaacaggttgaactgctgatcttcagatcctctacgccggacgcatcgtggccggatcaattccgttttccgctgcataaccctgcttcggggtcattatagcgattttttcggtatatccatcctttttcgcacgatatacaggattttgccaaagggttcgtgtagactttccttggtgtatccaacggcgtcagccgggcaggataggtgaagtaggcccacccgcgagcgggtgttccttcttcactgtcccttattcgcacctggcggtgctcaacgggaatcctgctctgcgaggctggccggctaccgccggcgtaacagatgagggcaagcggatggctgatgaaaccaagccaaccaggaagggcagcccacctatcacggaattgatccccctcgaattggaattcgttccgtctcgattcagatctaaaggatccaatctagataaaacgaaaggctcagtcgaaagactgggcctttcgttttacaattgggctaccttttttttgttttgtttgcaatggttaatctattgttaaaatttaaagtttcacttgaactttcaaataatgttcttatatttgcagtgtcgaaagaaacaaagtaggactgatcgggaggagtaaaaaatattaaaataatggtttttactctggaagattttgttggcgattggcgtcagaccgcgggttataatttggatcaagtcctggaacagggtggcgtaagctctctgttccagaacctgggtgtgagcgtgacgccgattcagcgcatcgttctgtccggcgagaacggtctgaaaattgatattcatgtgatcatcccgtacgaaggcctgagcggtgaccaaatgggtcaaatcgagaaaatctttaaagtcgtctacccagttgacgatcaccacttcaaggttatcttgcattacggtacgctggtgattgatggtgtgaccccgaatatgattgactatttcggccgtccgtatgaaggcattgccgtttttgacggtaaaaagatcaccgtcaccggtaccctgtggaatggcaataagattattgacgagcgtctgattaacccggacggcagcctgctgttccgcgtgaccatcaacggtgtcacgggttggcgtctgtgcgagcgcatcctggcataaatcctagctgattagctcgagaaggccatcctgacggatggccttttttttgtatcgagacgactagtgtaattgcctatcttccagtgatggaacagcatttgtgcattggctgcaacaatcagccttacttgtgcctgttctatttccgaaccgaccgcttgtatgaatccatcaaaattcgttttctctatgttggattccttgttgctcatattgtgatgataatttctacaaatatagtcattggtaactatctatgaaactgtttgatacttttatagttgattaaacttgttcatggcatttgccttaatatcatccgctatgtcaatgtagggtttcatagctttgtagtcgctgtgtcccgtccatttcatgaccacctgtgccgggattccgagagccagcgcattgcagatgaatgtccttcttcctgcatgggtactgagcaaagcgtatttgggtgtgacttcatcaatacgttcatttcccttgtagtaggtttcccgtacaggctcgttgatttctgccagttcgcccagctctttcaggtaatcgttcatcttctggttgctgatgacgggcagagccatgtaattctcgaaatggatgtccttgtatttgtccagtatggctttgctgtatttgttcagttcaatcgtcaggctgtcggcagtcttgactgtggttatttcgatgtggtcggacttcacatcgcttcttttcagattgcgaacatccgaataccgcaaactcgtaaagcagcagaacaggaaaacatcacgcacacgttccaggtattgcttatccttgggtatctggtagtctttcagcttgttcagttcatcccaagtcaggaagattacttttttcgaggtggttttcagtttcggtttgaacgtatcgtatgcaatgttctgatgatgtcctttcttgaagctccagcgcaggaaccatttgaggaatcccatttgcttgccgatggtgctgtttctcatatccttggtgtcacgcaggaagttgacgtattcgttcaatccaaactcgttgaaatagttgaacgttgcatcctccttgaactctttgaggtggttcctcactgctgcaaatttttcataggtggatgccgtccagttattctggttaccgcactcttttacaaactcatcgaacacctcccaaaagctgacaggggcttcttccggctgttcttcgctggtgtctttcattctcatgttgaaagcttccttcaactgttgggtcgttggcatgacctcctgcacctcaaattccttgaaaatattctggatttcggcatagtatttcagcaagtccgtattgatttcggctgcactttgctttagcttgttggtacatccgctctttacccgctgcttatctgcatcccatttggctacgtcaatccggtagcccgttgtaaactcgatgcgttggctggcaaagatgacacgcatacggatgggtacgttctctacgattggcacaccgttctttttccggctctccaatgcaaaaatgatgttgcgcttgatattcataattgggtgcgtttgaaattctacacccaaatatacacccaattattgagatagcaaaagacatttagaaacatttacttttactctatattgtaatttacacttgattatcagtcgtttgcagtcttatgatattctgtgaaagtataagttcgagagcctgtctctccgcaaaaaacgctgaaaatcagcagattgcaaaacaaacaccctgttttacacccaagaatgtaaagtcggctgtttttgttttatttaagataatacaaccactacataataaaagagtagcgatattaaaagaatccgatgagaaaagactaatatttatctatccattcagtttgatttttcaggactttacatcgtcctgaaagtatttgttggtaccgaggacgcgacagctgcagacgcgttatgagtaaacttggtctgacagttaccaatgcttaatcagtgaggcacctatctcagcgatctgtctatttcgttcatccatagttgcctgactccccgtcgtgtagataactacgatacgggagggcttaccatctggccccagtgctgcaatgataccgcgggacccacgctcaccggctccagatttatcagcaataaaccagccagccggaagggccgagcgcagaagtggtcctgcaactttatccgcctccatccagtctattaattgttgccgggaagctagagtaagtagttcgccagttaatagtttgcgcaacgttgttgccattgctacaggcatcgtggtgtcacgctcgtcgtttggtatggcttcattcagctccggttcccaacgatcaaggcgagttacatgatcccccatgttgtgcaaaaaagcggttagctccttcggtcctccgatcgttgtcagaagtaagttggccgcagtgttatcactcatggttatggcagcactgcataattctcttactgtcatgccatccgtaagatgcttttctgtgactggtgagtactcaaccaagtcattctgagaatagtgtatgcggcgac

SEQ ID NO: 139 - DNA, 5678 bp, Artificial sequence
  Synthetic sequence
cgagttgctcttgcccggcgtcaatacgggataataccgcgccacatagcagaactttaaaagtgctcatcattggaaaacgttcttcggggcgaaaactctcaaggatcttaccgctgttgagatccagttcgatgtaacccactcgtgcacccaactgatcttcagcatcttttactttcaccagcgtttctgggtgagcaaaaacaggaaggcaaaatgccgcaaaaaagggaataagggcgacacggaaatgttgaatactcatactcttcctttttcaatcatggccgcgggattaaaagtcggggattggtgaacaaaaaggtgtttctctctttaagagaaatatcgttttgctaaacagttgatattgaggtatcattttatcgtaaaagacatttttgctcaacaattgcttgacggaaatcaacaaattttagcattttgtaaaaaagtcgctatataatttggtgaattggagttattttcatatttttgcatcccgaagagtttctcttaaagagagaaacatcttttgcataccttttccgaccgaatttttatgtcgtaaagaggggctttgcagggggtggactcagaaagatgagaatagatgactattgtagttgaaacacatagaaagttgctgatatacagaccgatacgcatatcgggatgaaccatgagtacgttcttttctcaaaaaacataaatattcgaaaagagatgcaataaattaaggagaggttataatgaacaaagtaaatataaaagatagtcaaaattttattacttcaaaatatcacatagaaaaaataatgaattgcataagtttagatgaaaaagataacatctttgaaataggtgcagggaaaggtcattttactgctggattggtaaagagatgtaattttgtaacggcgatagaaattgattctaaattatgtgaggtaactcgtaataagctcttaaattatcctaactatcaaatagtaaatgatgatatactgaaatttacatttcctagccacaatccatataaaatatttggcagcataccttacaacataagcacaaatataattcgaaaaattgtttttgaaagttcagccacaataagttatttaatagtggaatatggttttgctaaaatgttattagatacaaacagatcactagcattgctgttaatggcagaggtagatatttctatattagcaaaaattcctaggtattatttccatccaaaacctaaagtggatagcacattaattgtattaaaaagaaagccagcaaaaatggcatttaaagagagaaaaaaatatgaaacttttgtaatgaaatgggttaacaaagagtacgaaaaactgtttacaaaaaatcaatttaataaagctttaaaacatgcgagaatatatgatataaacaatattagtttcgaacaatttgtatcgctatttaatagttataaaatatttaacggctaaaaacaataggccacatgcaactgtaaatgtttacgcgggtaccgacaccgcggtggaggggaattcccatgtcagccgttaagtgttcctgtgtcactcaaaattgctttgagaggctctaagggcttctcagtgcgttacatccctggcttgttgtccacaaccgttaaaccttaaaagctttaaaagccttatatattcttttttttcttataaaacttaaaaccttagaggctatttaagttgctgatttatattaattttattgttcaaacatgagagcttagtacgtgaaacatgagagcttagtacgttagccatgagagcttagtacgttagccatgagggtttagttcgttaaacatgagagcttagtacgttaaacatgagagcttagtacgtgaaacatgagagcttagtacgtactatcaacaggttgaactgctgatcttcagatcctctacgccggacgcatcgtggccggatcaattccgttttccgctgcataaccctgcttcggggtcattatagcgattttttcggtatatccatcctttttcgcacgatatacaggattttgccaaagggttcgtgtagactttccttggtgtatccaacggcgtcagccgggcaggataggtgaagtaggcccacccgcgagcgggtgttccttcttcactgtcccttattcgcacctggcggtgctcaacgggaatcctgctctgcgaggctggccggctaccgccggcgtaacagatgagggcaagcggatggctgatgaaaccaagccaaccaggaagggcagcccacctatcacggaattgatccccctcgaattggaattcgttccgtctcgattcagatctaaaggatccaatctagataaaacgaaaggctcagtcgaaagactgggcctttcgttttacaattgggctaccttttttttgttttgtttgcaatggttaatctattgttaaaatttaaagtttcacttgaactttcaaataatgttcttatatttgcagtgtcgaaagaaacaaagtaggactgatctctggggtgaataaaatttataataatggtttttactctggaagattttgttggcgattggcgtcagaccgcgggttataatttggatcaagtcctggaacagggtggcgtaagctctctgttccagaacctgggtgtgagcgtgacgccgattcagcgcatcgttctgtccggcgagaacggtctgaaaattgatattcatgtgatcatcccgtacgaaggcctgagcggtgaccaaatgggtcaaatcgagaaaatctttaaagtcgtctacccagttgacgatcaccacttcaaggttatcttgcattacggtacgctggtgattgatggtgtgaccccgaatatgattgactatttcggccgtccgtatgaaggcattgccgtttttgacggtaaaaagatcaccgtcaccggtaccctgtggaatggcaataagattattgacgagcgtctgattaacccggacggcagcctgctgttccgcgtgaccatcaacggtgtcacgggttggcgtctgtgcgagcgcatcctggcataaatcctagctgattagctcgagaaggccatcctgacggatggccttttttttgtatcgagacgactagtgtaattgcctatcttccagtgatggaacagcatttgtgcattggctgcaacaatcagccttacttgtgcctgttctatttccgaaccgaccgcttgtatgaatccatcaaaattcgttttctctatgttggattccttgttgctcatattgtgatgataatttctacaaatatagtcattggtaactatctatgaaactgtttgatacttttatagttgattaaacttgttcatggcatttgccttaatatcatccgctatgtcaatgtagggtttcatagctttgtagtcgctgtgtcccgtccatttcatgaccacctgtgccgggattccgagagccagcgcattgcagatgaatgtccttcttcctgcatgggtactgagcaaagcgtatttgggtgtgacttcatcaatacgttcatttcccttgtagtaggtttcccgtacaggctcgttgatttctgccagttcgcccagctctttcaggtaatcgttcatcttctggttgctgatgacgggcagagccatgtaattctcgaaatggatgtccttgtatttgtccagtatggctttgctgtatttgttcagttcaatcgtcaggctgtcggcagtcttgactgtggttatttcgatgtggtcggacttcacatcgcttcttttcagattgcgaacatccgaataccgcaaactcgtaaagcagcagaacaggaaaacatcacgcacacgttccaggtattgcttatccttgggtatctggtagtctttcagcttgttcagttcatcccaagtcaggaagattacttttttcgaggtggttttcagtttcggtttgaacgtatcgtatgcaatgttctgatgatgtcctttcttgaagctccagcgcaggaaccatttgaggaatcccatttgcttgccgatggtgctgtttctcatatccttggtgtcacgcaggaagttgacgtattcgttcaatccaaactcgttgaaatagttgaacgttgcatcctccttgaactctttgaggtggttcctcactgctgcaaatttttcataggtggatgccgtccagttattctggttaccgcactcttttacaaactcatcgaacacctcccaaaagctgacaggggcttcttccggctgttcttcgctggtgtctttcattctcatgttgaaagcttccttcaactgttgggtcgttggcatgacctcctgcacctcaaattccttgaaaatattctggatttcggcatagtatttcagcaagtccgtattgatttcggctgcactttgctttagcttgttggtacatccgctctttacccgctgcttatctgcatcccatttggctacgtcaatccggtagcccgttgtaaactcgatgcgttggctggcaaagatgacacgcatacggatgggtacgttctctacgattggcacaccgttctttttccggctctccaatgcaaaaatgatgttgcgcttgatattcataattgggtgcgtttgaaattctacacccaaatatacacccaattattgagatagcaaaagacatttagaaacatttacttttactctatattgtaatttacacttgattatcagtcgtttgcagtcttatgatattctgtgaaagtataagttcgagagcctgtctctccgcaaaaaacgctgaaaatcagcagattgcaaaacaaacaccctgttttacacccaagaatgtaaagtcggctgtttttgttttatttaagataatacaaccactacataataaaagagtagcgatattaaaagaatccgatgagaaaagactaatatttatctatccattcagtttgatttttcaggactttacatcgtcctgaaagtatttgttggtaccgaggacgcgacagctgcagacgcgttatgagtaaacttggtctgacagttaccaatgcttaatcagtgaggcacctatctcagcgatctgtctatttcgttcatccatagttgcctgactccccgtcgtgtagataactacgatacgggagggcttaccatctggccccagtgctgcaatgataccgcgggacccacgctcaccggctccagatttatcagcaataaaccagccagccggaagggccgagcgcagaagtggtcctgcaactttatccgcctccatccagtctattaattgttgccgggaagctagagtaagtagttcgccagttaatagtttgcgcaacgttgttgccattgctacaggcatcgtggtgtcacgctcgtcgtttggtatggcttcattcagctccggttcccaacgatcaaggcgagttacatgatcccccatgttgtgcaaaaaagcggttagctccttcggtcctccgatcgttgtcagaagtaagttggccgcagtgttatcactcatggttatggcagcactgcataattctcttactgtcatgccatccgtaagatgcttttctgtgactggtgagtactcaaccaagtcattctgagaatagtgtatgcggcgac

SEQ ID NO: 140 - DNA, 5678 bp, Artificial sequence
  Synthetic sequence
cgagttgctcttgcccggcgtcaatacgggataataccgcgccacatagcagaactttaaaagtgctcatcattggaaaacgttcttcggggcgaaaactctcaaggatcttaccgctgttgagatccagttcgatgtaacccactcgtgcacccaactgatcttcagcatcttttactttcaccagcgtttctgggtgagcaaaaacaggaaggcaaaatgccgcaaaaaagggaataagggcgacacggaaatgttgaatactcatactcttcctttttcaatcatggccgcgggattaaaagtcggggattggtgaacaaaaaggtgtttctctctttaagagaaatatcgttttgctaaacagttgatattgaggtatcattttatcgtaaaagacatttttgctcaacaattgcttgacggaaatcaacaaattttagcattttgtaaaaaagtcgctatataatttggtgaattggagttattttcatatttttgcatcccgaagagtttctcttaaagagagaaacatcttttgcataccttttccgaccgaatttttatgtcgtaaagaggggctttgcagggggtggactcagaaagatgagaatagatgactattgtagttgaaacacatagaaagttgctgatatacagaccgatacgcatatcgggatgaaccatgagtacgttcttttctcaaaaaacataaatattcgaaaagagatgcaataaattaaggagaggttataatgaacaaagtaaatataaaagatagtcaaaattttattacttcaaaatatcacatagaaaaaataatgaattgcataagtttagatgaaaaagataacatctttgaaataggtgcagggaaaggtcattttactgctggattggtaaagagatgtaattttgtaacggcgatagaaattgattctaaattatgtgaggtaactcgtaataagctcttaaattatcctaactatcaaatagtaaatgatgatatactgaaatttacatttcctagccacaatccatataaaatatttggcagcataccttacaacataagcacaaatataattcgaaaaattgtttttgaaagttcagccacaataagttatttaatagtggaatatggttttgctaaaatgttattagatacaaacagatcactagcattgctgttaatggcagaggtagatatttctatattagcaaaaattcctaggtattatttccatccaaaacctaaagtggatagcacattaattgtattaaaaagaaagccagcaaaaatggcatttaaagagagaaaaaaatatgaaacttttgtaatgaaatgggttaacaaagagtacgaaaaactgtttacaaaaaatcaatttaataaagctttaaaacatgcgagaatatatgatataaacaatattagtttcgaacaatttgtatcgctatttaatagttataaaatatttaacggctaaaaacaataggccacatgcaactgtaaatgtttacgcgggtaccgacaccgcggtggaggggaattcccatgtcagccgttaagtgttcctgtgtcactcaaaattgctttgagaggctctaagggcttctcagtgcgttacatccctggcttgttgtccacaaccgttaaaccttaaaagctttaaaagccttatatattcttttttttcttataaaacttaaaaccttagaggctatttaagttgctgatttatattaattttattgttcaaacatgagagcttagtacgtgaaacatgagagcttagtacgttagccatgagagcttagtacgttagccatgagggtttagttcgttaaacatgagagcttagtacgttaaacatgagagcttagtacgtgaaacatgagagcttagtacgtactatcaacaggttgaactgctgatcttcagatcctctacgccggacgcatcgtggccggatcaattccgttttccgctgcataaccctgcttcggggtcattatagcgattttttcggtatatccatcctttttcgcacgatatacaggattttgccaaagggttcgtgtagactttccttggtgtatccaacggcgtcagccgggcaggataggtgaagtaggcccacccgcgagcgggtgttccttcttcactgtcccttattcgcacctggcggtgctcaacgggaatcctgctctgcgaggctggccggctaccgccggcgtaacagatgagggcaagcggatggctgatgaaaccaagccaaccaggaagggcagcccacctatcacggaattgatccccctcgaattggaattcgttccgtctcgattcagatctaaaggatccaatctagataaaacgaaaggctcagtcgaaagactgggcctttcgttttacaattgggctaccttttttttgttttgtttgcaatggttaatctattgttaaaatttaaagtttcacttgaactttcaaataatgttcttatatttgcagtgtcgaaagaaacaaagtaggactgatcccccattctattaaattttagaataatggtttttactctggaagattttgttggcgattggcgtcagaccgcgggttataatttggatcaagtcctggaacagggtggcgtaagctctctgttccagaacctgggtgtgagcgtgacgccgattcagcgcatcgttctgtccggcgagaacggtctgaaaattgatattcatgtgatcatcccgtacgaaggcctgagcggtgaccaaatgggtcaaatcgagaaaatctttaaagtcgtctacccagttgacgatcaccacttcaaggttatcttgcattacggtacgctggtgattgatggtgtgaccccgaatatgattgactatttcggccgtccgtatgaaggcattgccgtttttgacggtaaaaagatcaccgtcaccggtaccctgtggaatggcaataagattattgacgagcgtctgattaacccggacggcagcctgctgttccgcgtgaccatcaacggtgtcacgggttggcgtctgtgcgagcgcatcctggcataaatcctagctgattagctcgagaaggccatcctgacggatggccttttttttgtatcgagacgactagtgtaattgcctatcttccagtgatggaacagcatttgtgcattggctgcaacaatcagccttacttgtgcctgttctatttccgaaccgaccgcttgtatgaatccatcaaaattcgttttctctatgttggattccttgttgctcatattgtgatgataatttctacaaatatagtcattggtaactatctatgaaactgtttgatacttttatagttgattaaacttgttcatggcatttgccttaatatcatccgctatgtcaatgtagggtttcatagctttgtagtcgctgtgtcccgtccatttcatgaccacctgtgccgggattccgagagccagcgcattgcagatgaatgtccttcttcctgcatgggtactgagcaaagcgtatttgggtgtgacttcatcaatacgttcatttcccttgtagtaggtttcccgtacaggctcgttgatttctgccagttcgcccagctctttcaggtaatcgttcatcttctggttgctgatgacgggcagagccatgtaattctcgaaatggatgtccttgtatttgtccagtatggctttgctgtatttgttcagttcaatcgtcaggctgtcggcagtcttgactgtggttatttcgatgtggtcggacttcacatcgcttcttttcagattgcgaacatccgaataccgcaaactcgtaaagcagcagaacaggaaaacatcacgcacacgttccaggtattgcttatccttgggtatctggtagtctttcagcttgttcagttcatcccaagtcaggaagattacttttttcgaggtggttttcagtttcggtttgaacgtatcgtatgcaatgttctgatgatgtcctttcttgaagctccagcgcaggaaccatttgaggaatcccatttgcttgccgatggtgctgtttctcatatccttggtgtcacgcaggaagttgacgtattcgttcaatccaaactcgttgaaatagttgaacgttgcatcctccttgaactctttgaggtggttcctcactgctgcaaatttttcataggtggatgccgtccagttattctggttaccgcactcttttacaaactcatcgaacacctcccaaaagctgacaggggcttcttccggctgttcttcgctggtgtctttcattctcatgttgaaagcttccttcaactgttgggtcgttggcatgacctcctgcacctcaaattccttgaaaatattctggatttcggcatagtatttcagcaagtccgtattgatttcggctgcactttgctttagcttgttggtacatccgctctttacccgctgcttatctgcatcccatttggctacgtcaatccggtagcccgttgtaaactcgatgcgttggctggcaaagatgacacgcatacggatgggtacgttctctacgattggcacaccgttctttttccggctctccaatgcaaaaatgatgttgcgcttgatattcataattgggtgcgtttgaaattctacacccaaatatacacccaattattgagatagcaaaagacatttagaaacatttacttttactctatattgtaatttacacttgattatcagtcgtttgcagtcttatgatattctgtgaaagtataagttcgagagcctgtctctccgcaaaaaacgctgaaaatcagcagattgcaaaacaaacaccctgttttacacccaagaatgtaaagtcggctgtttttgttttatttaagataatacaaccactacataataaaagagtagcgatattaaaagaatccgatgagaaaagactaatatttatctatccattcagtttgatttttcaggactttacatcgtcctgaaagtatttgttggtaccgaggacgcgacagctgcagacgcgttatgagtaaacttggtctgacagttaccaatgcttaatcagtgaggcacctatctcagcgatctgtctatttcgttcatccatagttgcctgactccccgtcgtgtagataactacgatacgggagggcttaccatctggccccagtgctgcaatgataccgcgggacccacgctcaccggctccagatttatcagcaataaaccagccagccggaagggccgagcgcagaagtggtcctgcaactttatccgcctccatccagtctattaattgttgccgggaagctagagtaagtagttcgccagttaatagtttgcgcaacgttgttgccattgctacaggcatcgtggtgtcacgctcgtcgtttggtatggcttcattcagctccggttcccaacgatcaaggcgagttacatgatcccccatgttgtgcaaaaaagcggttagctccttcggtcctccgatcgttgtcagaagtaagttggccgcagtgttatcactcatggttatggcagcactgcataattctcttactgtcatgccatccgtaagatgcttttctgtgactggtgagtactcaaccaagtcattctgagaatagtgtatgcggcgac

SEQ ID NO: 141 - DNA, 5678 bp, Artificial sequence
  Synthetic sequence
cgagttgctcttgcccggcgtcaatacgggataataccgcgccacatagcagaactttaaaagtgctcatcattggaaaacgttcttcggggcgaaaactctcaaggatcttaccgctgttgagatccagttcgatgtaacccactcgtgcacccaactgatcttcagcatcttttactttcaccagcgtttctgggtgagcaaaaacaggaaggcaaaatgccgcaaaaaagggaataagggcgacacggaaatgttgaatactcatactcttcctttttcaatcatggccgcgggattaaaagtcggggattggtgaacaaaaaggtgtttctctctttaagagaaatatcgttttgctaaacagttgatattgaggtatcattttatcgtaaaagacatttttgctcaacaattgcttgacggaaatcaacaaattttagcattttgtaaaaaagtcgctatataatttggtgaattggagttattttcatatttttgcatcccgaagagtttctcttaaagagagaaacatcttttgcataccttttccgaccgaatttttatgtcgtaaagaggggctttgcagggggtggactcagaaagatgagaatagatgactattgtagttgaaacacatagaaagttgctgatatacagaccgatacgcatatcgggatgaaccatgagtacgttcttttctcaaaaaacataaatattcgaaaagagatgcaataaattaaggagaggttataatgaacaaagtaaatataaaagatagtcaaaattttattacttcaaaatatcacatagaaaaaataatgaattgcataagtttagatgaaaaagataacatctttgaaataggtgcagggaaaggtcattttactgctggattggtaaagagatgtaattttgtaacggcgatagaaattgattctaaattatgtgaggtaactcgtaataagctcttaaattatcctaactatcaaatagtaaatgatgatatactgaaatttacatttcctagccacaatccatataaaatatttggcagcataccttacaacataagcacaaatataattcgaaaaattgtttttgaaagttcagccacaataagttatttaatagtggaatatggttttgctaaaatgttattagatacaaacagatcactagcattgctgttaatggcagaggtagatatttctatattagcaaaaattcctaggtattatttccatccaaaacctaaagtggatagcacattaattgtattaaaaagaaagccagcaaaaatggcatttaaagagagaaaaaaatatgaaacttttgtaatgaaatgggttaacaaagagtacgaaaaactgtttacaaaaaatcaatttaataaagctttaaaacatgcgagaatatatgatataaacaatattagtttcgaacaatttgtatcgctatttaatagttataaaatatttaacggctaaaaacaataggccacatgcaactgtaaatgtttacgcgggtaccgacaccgcggtggaggggaattcccatgtcagccgttaagtgttcctgtgtcactcaaaattgctttgagaggctctaagggcttctcagtgcgttacatccctggcttgttgtccacaaccgttaaaccttaaaagctttaaaagccttatatattcttttttttcttataaaacttaaaaccttagaggctatttaagttgctgatttatattaattttattgttcaaacatgagagcttagtacgtgaaacatgagagcttagtacgttagccatgagagcttagtacgttagccatgagggtttagttcgttaaacatgagagcttagtacgttaaacatgagagcttagtacgtgaaacatgagagcttagtacgtactatcaacaggttgaactgctgatcttcagatcctctacgccggacgcatcgtggccggatcaattccgttttccgctgcataaccctgcttcggggtcattatagcgattttttcggtatatccatcctttttcgcacgatatacaggattttgccaaagggttcgtgtagactttccttggtgtatccaacggcgtcagccgggcaggataggtgaagtaggcccacccgcgagcgggtgttccttcttcactgtcccttattcgcacctggcggtgctcaacgggaatcctgctctgcgaggctggccggctaccgccggcgtaacagatgagggcaagcggatggctgatgaaaccaagccaaccaggaagggcagcccacctatcacggaattgatccccctcgaattggaattcgttccgtctcgattcagatctaaaggatccaatctagataaaacgaaaggctcagtcgaaagactgggcctttcgttttacaattgggctaccttttttttgttttgtttgcaatggttaatctattgttaaaatttaaagtttcacttgaactttcaaataatgttcttatatttgcagtgtcgaaagaaacaaagtaggactgatcggtgttagctttaaatattagaataatggtttttactctggaagattttgttggcgattggcgtcagaccgcgggttataatttggatcaagtcctggaacagggtggcgtaagctctctgttccagaacctgggtgtgagcgtgacgccgattcagcgcatcgttctgtccggcgagaacggtctgaaaattgatattcatgtgatcatcccgtacgaaggcctgagcggtgaccaaatgggtcaaatcgagaaaatctttaaagtcgtctacccagttgacgatcaccacttcaaggttatcttgcattacggtacgctggtgattgatggtgtgaccccgaatatgattgactatttcggccgtccgtatgaaggcattgccgtttttgacggtaaaaagatcaccgtcaccggtaccctgtggaatggcaataagattattgacgagcgtctgattaacccggacggcagcctgctgttccgcgtgaccatcaacggtgtcacgggttggcgtctgtgcgagcgcatcctggcataaatcctagctgattagctcgagaaggccatcctgacggatggccttttttttgtatcgagacgactagtgtaattgcctatcttccagtgatggaacagcatttgtgcattggctgcaacaatcagccttacttgtgcctgttctatttccgaaccgaccgcttgtatgaatccatcaaaattcgttttctctatgttggattccttgttgctcatattgtgatgataatttctacaaatatagtcattggtaactatctatgaaactgtttgatacttttatagttgattaaacttgttcatggcatttgccttaatatcatccgctatgtcaatgtagggtttcatagctttgtagtcgctgtgtcccgtccatttcatgaccacctgtgccgggattccgagagccagcgcattgcagatgaatgtccttcttcctgcatgggtactgagcaaagcgtatttgggtgtgacttcatcaatacgttcatttcccttgtagtaggtttcccgtacaggctcgttgatttctgccagttcgcccagctctttcaggtaatcgttcatcttctggttgctgatgacgggcagagccatgtaattctcgaaatggatgtccttgtatttgtccagtatggctttgctgtatttgttcagttcaatcgtcaggctgtcggcagtcttgactgtggttatttcgatgtggtcggacttcacatcgcttcttttcagattgcgaacatccgaataccgcaaactcgtaaagcagcagaacaggaaaacatcacgcacacgttccaggtattgcttatccttgggtatctggtagtctttcagcttgttcagttcatcccaagtcaggaagattacttttttcgaggtggttttcagtttcggtttgaacgtatcgtatgcaatgttctgatgatgtcctttcttgaagctccagcgcaggaaccatttgaggaatcccatttgcttgccgatggtgctgtttctcatatccttggtgtcacgcaggaagttgacgtattcgttcaatccaaactcgttgaaatagttgaacgttgcatcctccttgaactctttgaggtggttcctcactgctgcaaatttttcataggtggatgccgtccagttattctggttaccgcactcttttacaaactcatcgaacacctcccaaaagctgacaggggcttcttccggctgttcttcgctggtgtctttcattctcatgttgaaagcttccttcaactgttgggtcgttggcatgacctcctgcacctcaaattccttgaaaatattctggatttcggcatagtatttcagcaagtccgtattgatttcggctgcactttgctttagcttgttggtacatccgctctttacccgctgcttatctgcatcccatttggctacgtcaatccggtagcccgttgtaaactcgatgcgttggctggcaaagatgacacgcatacggatgggtacgttctctacgattggcacaccgttctttttccggctctccaatgcaaaaatgatgttgcgcttgatattcataattgggtgcgtttgaaattctacacccaaatatacacccaattattgagatagcaaaagacatttagaaacatttacttttactctatattgtaatttacacttgattatcagtcgtttgcagtcttatgatattctgtgaaagtataagttcgagagcctgtctctccgcaaaaaacgctgaaaatcagcagattgcaaaacaaacaccctgttttacacccaagaatgtaaagtcggctgtttttgttttatttaagataatacaaccactacataataaaagagtagcgatattaaaagaatccgatgagaaaagactaatatttatctatccattcagtttgatttttcaggactttacatcgtcctgaaagtatttgttggtaccgaggacgcgacagctgcagacgcgttatgagtaaacttggtctgacagttaccaatgcttaatcagtgaggcacctatctcagcgatctgtctatttcgttcatccatagttgcctgactccccgtcgtgtagataactacgatacgggagggcttaccatctggccccagtgctgcaatgataccgcgggacccacgctcaccggctccagatttatcagcaataaaccagccagccggaagggccgagcgcagaagtggtcctgcaactttatccgcctccatccagtctattaattgttgccgggaagctagagtaagtagttcgccagttaatagtttgcgcaacgttgttgccattgctacaggcatcgtggtgtcacgctcgtcgtttggtatggcttcattcagctccggttcccaacgatcaaggcgagttacatgatcccccatgttgtgcaaaaaagcggttagctccttcggtcctccgatcgttgtcagaagtaagttggccgcagtgttatcactcatggttatggcagcactgcataattctcttactgtcatgccatccgtaagatgcttttctgtgactggtgagtactcaaccaagtcattctgagaatagtgtatgcggcgac

SEQ ID NO: 142 - DNA, 5678 bp, Artificial sequence
  Synthetic sequence
cgagttgctcttgcccggcgtcaatacgggataataccgcgccacatagcagaactttaaaagtgctcatcattggaaaacgttcttcggggcgaaaactctcaaggatcttaccgctgttgagatccagttcgatgtaacccactcgtgcacccaactgatcttcagcatcttttactttcaccagcgtttctgggtgagcaaaaacaggaaggcaaaatgccgcaaaaaagggaataagggcgacacggaaatgttgaatactcatactcttcctttttcaatcatggccgcgggattaaaagtcggggattggtgaacaaaaaggtgtttctctctttaagagaaatatcgttttgctaaacagttgatattgaggtatcattttatcgtaaaagacatttttgctcaacaattgcttgacggaaatcaacaaattttagcattttgtaaaaaagtcgctatataatttggtgaattggagttattttcatatttttgcatcccgaagagtttctcttaaagagagaaacatcttttgcataccttttccgaccgaatttttatgtcgtaaagaggggctttgcagggggtggactcagaaagatgagaatagatgactattgtagttgaaacacatagaaagttgctgatatacagaccgatacgcatatcgggatgaaccatgagtacgttcttttctcaaaaaacataaatattcgaaaagagatgcaataaattaaggagaggttataatgaacaaagtaaatataaaagatagtcaaaattttattacttcaaaatatcacatagaaaaaataatgaattgcataagtttagatgaaaaagataacatctttgaaataggtgcagggaaaggtcattttactgctggattggtaaagagatgtaattttgtaacggcgatagaaattgattctaaattatgtgaggtaactcgtaataagctcttaaattatcctaactatcaaatagtaaatgatgatatactgaaatttacatttcctagccacaatccatataaaatatttggcagcataccttacaacataagcacaaatataattcgaaaaattgtttttgaaagttcagccacaataagttatttaatagtggaatatggttttgctaaaatgttattagatacaaacagatcactagcattgctgttaatggcagaggtagatatttctatattagcaaaaattcctaggtattatttccatccaaaacctaaagtggatagcacattaattgtattaaaaagaaagccagcaaaaatggcatttaaagagagaaaaaaatatgaaacttttgtaatgaaatgggttaacaaagagtacgaaaaactgtttacaaaaaatcaatttaataaagctttaaaacatgcgagaatatatgatataaacaatattagtttcgaacaatttgtatcgctatttaatagttataaaatatttaacggctaaaaacaataggccacatgcaactgtaaatgtttacgcgggtaccgacaccgcggtggaggggaattcccatgtcagccgttaagtgttcctgtgtcactcaaaattgctttgagaggctctaagggcttctcagtgcgttacatccctggcttgttgtccacaaccgttaaaccttaaaagctttaaaagccttatatattcttttttttcttataaaacttaaaaccttagaggctatttaagttgctgatttatattaattttattgttcaaacatgagagcttagtacgtgaaacatgagagcttagtacgttagccatgagagcttagtacgttagccatgagggtttagttcgttaaacatgagagcttagtacgttaaacatgagagcttagtacgtgaaacatgagagcttagtacgtactatcaacaggttgaactgctgatcttcagatcctctacgccggacgcatcgtggccggatcaattccgttttccgctgcataaccctgcttcggggtcattatagcgattttttcggtatatccatcctttttcgcacgatatacaggattttgccaaagggttcgtgtagactttccttggtgtatccaacggcgtcagccgggcaggataggtgaagtaggcccacccgcgagcgggtgttccttcttcactgtcccttattcgcacctggcggtgctcaacgggaatcctgctctgcgaggctggccggctaccgccggcgtaacagatgagggcaagcggatggctgatgaaaccaagccaaccaggaagggcagcccacctatcacggaattgatccccctcgaattggaattcgttccgtctcgattcagatctaaaggatccaatctagataaaacgaaaggctcagtcgaaagactgggcctttcgttttacaattgggctaccttttttttgttttgtttgcaatggttaatctattgttaaaatttaaagtttcacttgaactttcaaataatgttcttatatttgcagtgtcgaaagaaacaaagtaggactgatctagcactcttaaaaaaattaaaataatggtttttactctggaagattttgttggcgattggcgtcagaccgcgggttataatttggatcaagtcctggaacagggtggcgtaagctctctgttccagaacctgggtgtgagcgtgacgccgattcagcgcatcgttctgtccggcgagaacggtctgaaaattgatattcatgtgatcatcccgtacgaaggcctgagcggtgaccaaatgggtcaaatcgagaaaatctttaaagtcgtctacccagttgacgatcaccacttcaaggttatcttgcattacggtacgctggtgattgatggtgtgaccccgaatatgattgactatttcggccgtccgtatgaaggcattgccgtttttgacggtaaaaagatcaccgtcaccggtaccctgtggaatggcaataagattattgacgagcgtctgattaacccggacggcagcctgctgttccgcgtgaccatcaacggtgtcacgggttggcgtctgtgcgagcgcatcctggcataaatcctagctgattagctcgagaaggccatcctgacggatggccttttttttgtatcgagacgactagtgtaattgcctatcttccagtgatggaacagcatttgtgcattggctgcaacaatcagccttacttgtgcctgttctatttccgaaccgaccgcttgtatgaatccatcaaaattcgttttctctatgttggattccttgttgctcatattgtgatgataatttctacaaatatagtcattggtaactatctatgaaactgtttgatacttttatagttgattaaacttgttcatggcatttgccttaatatcatccgctatgtcaatgtagggtttcatagctttgtagtcgctgtgtcccgtccatttcatgaccacctgtgccgggattccgagagccagcgcattgcagatgaatgtccttcttcctgcatgggtactgagcaaagcgtatttgggtgtgacttcatcaatacgttcatttcccttgtagtaggtttcccgtacaggctcgttgatttctgccagttcgcccagctctttcaggtaatcgttcatcttctggttgctgatgacgggcagagccatgtaattctcgaaatggatgtccttgtatttgtccagtatggctttgctgtatttgttcagttcaatcgtcaggctgtcggcagtcttgactgtggttatttcgatgtggtcggacttcacatcgcttcttttcagattgcgaacatccgaataccgcaaactcgtaaagcagcagaacaggaaaacatcacgcacacgttccaggtattgcttatccttgggtatctggtagtctttcagcttgttcagttcatcccaagtcaggaagattacttttttcgaggtggttttcagtttcggtttgaacgtatcgtatgcaatgttctgatgatgtcctttcttgaagctccagcgcaggaaccatttgaggaatcccatttgcttgccgatggtgctgtttctcatatccttggtgtcacgcaggaagttgacgtattcgttcaatccaaactcgttgaaatagttgaacgttgcatcctccttgaactctttgaggtggttcctcactgctgcaaatttttcataggtggatgccgtccagttattctggttaccgcactcttttacaaactcatcgaacacctcccaaaagctgacaggggcttcttccggctgttcttcgctggtgtctttcattctcatgttgaaagcttccttcaactgttgggtcgttggcatgacctcctgcacctcaaattccttgaaaatattctggatttcggcatagtatttcagcaagtccgtattgatttcggctgcactttgctttagcttgttggtacatccgctctttacccgctgcttatctgcatcccatttggctacgtcaatccggtagcccgttgtaaactcgatgcgttggctggcaaagatgacacgcatacggatgggtacgttctctacgattggcacaccgttctttttccggctctccaatgcaaaaatgatgttgcgcttgatattcataattgggtgcgtttgaaattctacacccaaatatacacccaattattgagatagcaaaagacatttagaaacatttacttttactctatattgtaatttacacttgattatcagtcgtttgcagtcttatgatattctgtgaaagtataagttcgagagcctgtctctccgcaaaaaacgctgaaaatcagcagattgcaaaacaaacaccctgttttacacccaagaatgtaaagtcggctgtttttgttttatttaagataatacaaccactacataataaaagagtagcgatattaaaagaatccgatgagaaaagactaatatttatctatccattcagtttgatttttcaggactttacatcgtcctgaaagtatttgttggtaccgaggacgcgacagctgcagacgcgttatgagtaaacttggtctgacagttaccaatgcttaatcagtgaggcacctatctcagcgatctgtctatttcgttcatccatagttgcctgactccccgtcgtgtagataactacgatacgggagggcttaccatctggccccagtgctgcaatgataccgcgggacccacgctcaccggctccagatttatcagcaataaaccagccagccggaagggccgagcgcagaagtggtcctgcaactttatccgcctccatccagtctattaattgttgccgggaagctagagtaagtagttcgccagttaatagtttgcgcaacgttgttgccattgctacaggcatcgtggtgtcacgctcgtcgtttggtatggcttcattcagctccggttcccaacgatcaaggcgagttacatgatcccccatgttgtgcaaaaaagcggttagctccttcggtcctccgatcgttgtcagaagtaagttggccgcagtgttatcactcatggttatggcagcactgcataattctcttactgtcatgccatccgtaagatgcttttctgtgactggtgagtactcaaccaagtcattctgagaatagtgtatgcggcgac

SEQ ID NO: 143 - DNA, 5678 bp, Artificial sequence
  Synthetic sequence
cgagttgctcttgcccggcgtcaatacgggataataccgcgccacatagcagaactttaaaagtgctcatcattggaaaacgttcttcggggcgaaaactctcaaggatcttaccgctgttgagatccagttcgatgtaacccactcgtgcacccaactgatcttcagcatcttttactttcaccagcgtttctgggtgagcaaaaacaggaaggcaaaatgccgcaaaaaagggaataagggcgacacggaaatgttgaatactcatactcttcctttttcaatcatggccgcgggattaaaagtcggggattggtgaacaaaaaggtgtttctctctttaagagaaatatcgttttgctaaacagttgatattgaggtatcattttatcgtaaaagacatttttgctcaacaattgcttgacggaaatcaacaaattttagcattttgtaaaaaagtcgctatataatttggtgaattggagttattttcatatttttgcatcccgaagagtttctcttaaagagagaaacatcttttgcataccttttccgaccgaatttttatgtcgtaaagaggggctttgcagggggtggactcagaaagatgagaatagatgactattgtagttgaaacacatagaaagttgctgatatacagaccgatacgcatatcgggatgaaccatgagtacgttcttttctcaaaaaacataaatattcgaaaagagatgcaataaattaaggagaggttataatgaacaaagtaaatataaaagatagtcaaaattttattacttcaaaatatcacatagaaaaaataatgaattgcataagtttagatgaaaaagataacatctttgaaataggtgcagggaaaggtcattttactgctggattggtaaagagatgtaattttgtaacggcgatagaaattgattctaaattatgtgaggtaactcgtaataagctcttaaattatcctaactatcaaatagtaaatgatgatatactgaaatttacatttcctagccacaatccatataaaatatttggcagcataccttacaacataagcacaaatataattcgaaaaattgtttttgaaagttcagccacaataagttatttaatagtggaatatggttttgctaaaatgttattagatacaaacagatcactagcattgctgttaatggcagaggtagatatttctatattagcaaaaattcctaggtattatttccatccaaaacctaaagtggatagcacattaattgtattaaaaagaaagccagcaaaaatggcatttaaagagagaaaaaaatatgaaacttttgtaatgaaatgggttaacaaagagtacgaaaaactgtttacaaaaaatcaatttaataaagctttaaaacatgcgagaatatatgatataaacaatattagtttcgaacaatttgtatcgctatttaatagttataaaatatttaacggctaaaaacaataggccacatgcaactgtaaatgtttacgcgggtaccgacaccgcggtggaggggaattcccatgtcagccgttaagtgttcctgtgtcactcaaaattgctttgagaggctctaagggcttctcagtgcgttacatccctggcttgttgtccacaaccgttaaaccttaaaagctttaaaagccttatatattcttttttttcttataaaacttaaaaccttagaggctatttaagttgctgatttatattaattttattgttcaaacatgagagcttagtacgtgaaacatgagagcttagtacgttagccatgagagcttagtacgttagccatgagggtttagttcgttaaacatgagagcttagtacgttaaacatgagagcttagtacgtgaaacatgagagcttagtacgtactatcaacaggttgaactgctgatcttcagatcctctacgccggacgcatcgtggccggatcaattccgttttccgctgcataaccctgcttcggggtcattatagcgattttttcggtatatccatcctttttcgcacgatatacaggattttgccaaagggttcgtgtagactttccttggtgtatccaacggcgtcagccgggcaggataggtgaagtaggcccacccgcgagcgggtgttccttcttcactgtcccttattcgcacctggcggtgctcaacgggaatcctgctctgcgaggctggccggctaccgccggcgtaacagatgagggcaagcggatggctgatgaaaccaagccaaccaggaagggcagcccacctatcacggaattgatccccctcgaattggaattcgttccgtctcgattcagatctaaaggatccaatctagataaaacgaaaggctcagtcgaaagactgggcctttcgttttacaattgggctaccttttttttgttttgtttgcaatggttaatctattgttaaaatttaaagtttcacttgaactttcaaataatgttcttatatttgcagtgtcgaaagaaacaaagtaggactgatcgtaatctttaaaaaaaataaaaataatggtttttactctggaagattttgttggcgattggcgtcagaccgcgggttataatttggatcaagtcctggaacagggtggcgtaagctctctgttccagaacctgggtgtgagcgtgacgccgattcagcgcatcgttctgtccggcgagaacggtctgaaaattgatattcatgtgatcatcccgtacgaaggcctgagcggtgaccaaatgggtcaaatcgagaaaatctttaaagtcgtctacccagttgacgatcaccacttcaaggttatcttgcattacggtacgctggtgattgatggtgtgaccccgaatatgattgactatttcggccgtccgtatgaaggcattgccgtttttgacggtaaaaagatcaccgtcaccggtaccctgtggaatggcaataagattattgacgagcgtctgattaacccggacggcagcctgctgttccgcgtgaccatcaacggtgtcacgggttggcgtctgtgcgagcgcatcctggcataaatcctagctgattagctcgagaaggccatcctgacggatggccttttttttgtatcgagacgactagtgtaattgcctatcttccagtgatggaacagcatttgtgcattggctgcaacaatcagccttacttgtgcctgttctatttccgaaccgaccgcttgtatgaatccatcaaaattcgttttctctatgttggattccttgttgctcatattgtgatgataatttctacaaatatagtcattggtaactatctatgaaactgtttgatacttttatagttgattaaacttgttcatggcatttgccttaatatcatccgctatgtcaatgtagggtttcatagctttgtagtcgctgtgtcccgtccatttcatgaccacctgtgccgggattccgagagccagcgcattgcagatgaatgtccttcttcctgcatgggtactgagcaaagcgtatttgggtgtgacttcatcaatacgttcatttcccttgtagtaggtttcccgtacaggctcgttgatttctgccagttcgcccagctctttcaggtaatcgttcatcttctggttgctgatgacgggcagagccatgtaattctcgaaatggatgtccttgtatttgtccagtatggctttgctgtatttgttcagttcaatcgtcaggctgtcggcagtcttgactgtggttatttcgatgtggtcggacttcacatcgcttcttttcagattgcgaacatccgaataccgcaaactcgtaaagcagcagaacaggaaaacatcacgcacacgttccaggtattgcttatccttgggtatctggtagtctttcagcttgttcagttcatcccaagtcaggaagattacttttttcgaggtggttttcagtttcggtttgaacgtatcgtatgcaatgttctgatgatgtcctttcttgaagctccagcgcaggaaccatttgaggaatcccatttgcttgccgatggtgctgtttctcatatccttggtgtcacgcaggaagttgacgtattcgttcaatccaaactcgttgaaatagttgaacgttgcatcctccttgaactctttgaggtggttcctcactgctgcaaatttttcataggtggatgccgtccagttattctggttaccgcactcttttacaaactcatcgaacacctcccaaaagctgacaggggcttcttccggctgttcttcgctggtgtctttcattctcatgttgaaagcttccttcaactgttgggtcgttggcatgacctcctgcacctcaaattccttgaaaatattctggatttcggcatagtatttcagcaagtccgtattgatttcggctgcactttgctttagcttgttggtacatccgctctttacccgctgcttatctgcatcccatttggctacgtcaatccggtagcccgttgtaaactcgatgcgttggctggcaaagatgacacgcatacggatgggtacgttctctacgattggcacaccgttctttttccggctctccaatgcaaaaatgatgttgcgcttgatattcataattgggtgcgtttgaaattctacacccaaatatacacccaattattgagatagcaaaagacatttagaaacatttacttttactctatattgtaatttacacttgattatcagtcgtttgcagtcttatgatattctgtgaaagtataagttcgagagcctgtctctccgcaaaaaacgctgaaaatcagcagattgcaaaacaaacaccctgttttacacccaagaatgtaaagtcggctgtttttgttttatttaagataatacaaccactacataataaaagagtagcgatattaaaagaatccgatgagaaaagactaatatttatctatccattcagtttgatttttcaggactttacatcgtcctgaaagtatttgttggtaccgaggacgcgacagctgcagacgcgttatgagtaaacttggtctgacagttaccaatgcttaatcagtgaggcacctatctcagcgatctgtctatttcgttcatccatagttgcctgactccccgtcgtgtagataactacgatacgggagggcttaccatctggccccagtgctgcaatgataccgcgggacccacgctcaccggctccagatttatcagcaataaaccagccagccggaagggccgagcgcagaagtggtcctgcaactttatccgcctccatccagtctattaattgttgccgggaagctagagtaagtagttcgccagttaatagtttgcgcaacgttgttgccattgctacaggcatcgtggtgtcacgctcgtcgtttggtatggcttcattcagctccggttcccaacgatcaaggcgagttacatgatcccccatgttgtgcaaaaaagcggttagctccttcggtcctccgatcgttgtcagaagtaagttggccgcagtgttatcactcatggttatggcagcactgcataattctcttactgtcatgccatccgtaagatgcttttctgtgactggtgagtactcaaccaagtcattctgagaatagtgtatgcggcgac

SEQ ID NO: 144 - DNA, 6031 bp, Artificial sequence
  Synthetic sequence
caccgcggtggaggggaattcccatgtcagccgttaagtgttcctgtgtcactcaaaattgctttgagaggctctaagggcttctcagtgcgttacatccctggcttgttgtccacaaccgttaaaccttaaaagctttaaaagccttatatattcttttttttcttataaaacttaaaaccttagaggctatttaagttgctgatttatattaattttattgttcaaacatgagagcttagtacgtgaaacatgagagcttagtacgttagccatgagagcttagtacgttagccatgagggtttagttcgttaaacatgagagcttagtacgttaaacatgagagcttagtacgtgaaacatgagagcttagtacgtactatcaacaggttgaactgctgatcttcagatcctctacgccggacgcatcgtggccggatcaattccgttttccgctgcataaccctgcttcggggtcattatagcgattttttcggtatatccatcctttttcgcacgatatacaggattttgccaaagggttcgtgtagactttccttggtgtatccaacggcgtcagccgggcaggataggtgaagtaggcccacccgcgagcgggtgttccttcttcactgtcccttattcgcacctggcggtgctcaacgggaatcctgctctgcgaggctggccggctaccgccggcgtaacagatgagggcaagcggatggctgatgaaaccaagccaaccaggaagggcagcccacctatcacggaattgatccccctcgaattggaattcgttccgtctcgattcagatctaaaggatccaatctagataaaacgaaaggctcagtcgaaagactgggcctttcgttttacaattgggctaccttttttttgttttgtttgcaatggttaatctattgttaaaatttaaagtttcacttgaactttcaaataatgttcttatatttgcagtgtcgaaagaaacaaagtaggactgatcacacaacatttaaaaaataacattatgaaagcactcgaaaagagattcaaaggtaatattaacaataatttattttcaatgcgtaaaggcgaagagctgttcactggtgtcgtccctattctggtggaactggatggtgatgtcaacggtcataagttttccgtgcgtggcgagggtgaaggtgacgcaactaatggtaaactgacgctgaagttcatctgtactactggtaaactgccggttccttggccgactctggtaacgacgctgacttatggtgttcagtgctttgctcgttatccggaccatatgaagcagcatgacttcttcaagtccgccatgccggaaggctatgtgcaggaacgcacgatttcctttaaggatgacggcacgtacaaaacgcgtgcggaagtgaaatttgaaggcgataccctggtaaaccgcattgagctgaaaggcattgactttaaagaagacggcaatatcctgggccataagctggaatacaattttaacagccacaatgtttacatcaccgccgataaacaaaaaaatggcattaaagcgaattttaaaattcgccacaacgtggaggatggcagcgtgcagctggctgatcactaccagcaaaacactccaatcggtgatggtcctgttctgctgccagacaatcactatctgagcacgcaaagcgttctgtctaaagatccgaacgagaaacgcgatcatatggttctgctggagttcgtaaccgcagcgggcatcacgcatggtatggatgaactgtacaaaggatctgattacaaggacgatgatgataaggactacaaagatgatgatgacaaagattataaggacgatgatgataaaggtcatcatcatcatcatcactaaatcctagctgattagctcgagaaggccatcctgacggatggccttttttttgtatcgagacgactagtgtaattgcctatcttccagtgatggaacagcatttgtgcattggctgcaacaatcagccttacttgtgcctgttctatttccgaaccgaccgcttgtatgaatccatcaaaattcgttttctctatgttggattccttgttgctcatattgtgatgataatttctacaaatatagtcattggtaactatctatgaaactgtttgatacttttatagttgattaaacttgttcatggcatttgccttaatatcatccgctatgtcaatgtagggtttcatagctttgtagtcgctgtgtcccgtccatttcatgaccacctgtgccgggattccgagagccagcgcattgcagatgaatgtccttcttcctgcatgggtactgagcaaagcgtatttgggtgtgacttcatcaatacgttcatttcccttgtagtaggtttcccgtacaggctcgttgatttctgccagttcgcccagctctttcaggtaatcgttcatcttctggttgctgatgacgggcagagccatgtaattctcgaaatggatgtccttgtatttgtccagtatggctttgctgtatttgttcagttcaatcgtcaggctgtcggcagtcttgactgtggttatttcgatgtggtcggacttcacatcgcttcttttcagattgcgaacatccgaataccgcaaactcgtaaagcagcagaacaggaaaacatcacgcacacgttccaggtattgcttatccttgggtatctggtagtctttcagcttgttcagttcatcccaagtcaggaagattacttttttcgaggtggttttcagtttcggtttgaacgtatcgtatgcaatgttctgatgatgtcctttcttgaagctccagcgcaggaaccatttgaggaatcccatttgcttgccgatggtgctgtttctcatatccttggtgtcacgcaggaagttgacgtattcgttcaatccaaactcgttgaaatagttgaacgttgcatcctccttgaactctttgaggtggttcctcactgctgcaaatttttcataggtggatgccgtccagttattctggttaccgcactcttttacaaactcatcgaacacctcccaaaagctgacaggggcttcttccggctgttcttcgctggtgtctttcattctcatgttgaaagcttccttcaactgttgggtcgttggcatgacctcctgcacctcaaattccttgaaaatattctggatttcggcatagtatttcagcaagtccgtattgatttcggctgcactttgctttagcttgttggtacatccgctctttacccgctgcttatctgcatcccatttggctacgtcaatccggtagcccgttgtaaactcgatgcgttggctggcaaagatgacacgcatacggatgggtacgttctctacgattggcacaccgttctttttccggctctccaatgcaaaaatgatgttgcgcttgatattcataattgggtgcgtttgaaattctacacccaaatatacacccaattattgagatagcaaaagacatttagaaacatttacttttactctatattgtaatttacacttgattatcagtcgtttgcagtcttatgatattctgtgaaagtataagttcgagagcctgtctctccgcaaaaaacgctgaaaatcagcagattgcaaaacaaacaccctgttttacacccaagaatgtaaagtcggctgtttttgttttatttaagataatacaaccactacataataaaagagtagcgatattaaaagaatccgatgagaaaagactaatatttatctatccattcagtttgatttttcaggactttacatcgtcctgaaagtatttgttggtaccgaggacgcgacagctgcagacgcgttatgagtaaacttggtctgacagttaccaatgcttaatcagtgaggcacctatctcagcgatctgtctatttcgttcatccatagttgcctgactccccgtcgtgtagataactacgatacgggagggcttaccatctggccccagtgctgcaatgataccgcgggacccacgctcaccggctccagatttatcagcaataaaccagccagccggaagggccgagcgcagaagtggtcctgcaactttatccgcctccatccagtctattaattgttgccgggaagctagagtaagtagttcgccagttaatagtttgcgcaacgttgttgccattgctacaggcatcgtggtgtcacgctcgtcgtttggtatggcttcattcagctccggttcccaacgatcaaggcgagttacatgatcccccatgttgtgcaaaaaagcggttagctccttcggtcctccgatcgttgtcagaagtaagttggccgcagtgttatcactcatggttatggcagcactgcataattctcttactgtcatgccatccgtaagatgcttttctgtgactggtgagtactcaaccaagtcattctgagaatagtgtatgcggcgaccgagttgctcttgcccggcgtcaatacgggataataccgcgccacatagcagaactttaaaagtgctcatcattggaaaacgttcttcggggcgaaaactctcaaggatcttaccgctgttgagatccagttcgatgtaacccactcgtgcacccaactgatcttcagcatcttttactttcaccagcgtttctgggtgagcaaaaacaggaaggcaaaatgccgcaaaaaagggaataagggcgacacggaaatgttgaatactcatactcttcctttttcaatcatggccgcgggattaaaagtcggggattggtgaacaaaaaggtgtttctctctttaagagaaatatcgttttgctaaacagttgatattgaggtatcattttatcgtaaaagacatttttgctcaacaattgcttgacggaaatcaacaaattttagcattttgtaaaaaagtcgctatataatttggtgaattggagttattttcatatttttgcatcccgaagagtttctcttaaagagagaaacatcttttgcataccttttccgaccgaatttttatgtcgtaaagaggggctttgcagggggtggactcagaaagatgagaatagatgactattgtagttgaaacacatagaaagttgctgatatacagaccgatacgcatatcgggatgaaccatgagtacgttcttttctcaaaaaacataaatattcgaaaagagatgcaataaattaaggagaggttataatgaacaaagtaaatataaaagatagtcaaaattttattacttcaaaatatcacatagaaaaaataatgaattgcataagtttagatgaaaaagataacatctttgaaataggtgcagggaaaggtcattttactgctggattggtaaagagatgtaattttgtaacggcgatagaaattgattctaaattatgtgaggtaactcgtaataagctcttaaattatcctaactatcaaatagtaaatgatgatatactgaaatttacatttcctagccacaatccatataaaatatttggcagcataccttacaacataagcacaaatataattcgaaaaattgtttttgaaagttcagccacaataagttatttaatagtggaatatggttttgctaaaatgttattagatacaaacagatcactagcattgctgttaatggcagaggtagatatttctatattagcaaaaattcctaggtattatttccatccaaaacctaaagtggatagcacattaattgtattaaaaagaaagccagcaaaaatggcatttaaagagagaaaaaaatatgaaacttttgtaatgaaatgggttaacaaagagtacgaaaaactgtttacaaaaaatcaatttaataaagctttaaaacatgcgagaatatatgatataaacaatattagtttcgaacaatttgtatcgctatttaatagttataaaatatttaacggctaaaaacaataggccacatgcaactgtaaatgtttacgcgggtaccga

SEQ ID NO: 145 - DNA, 5855 bp, Artificial sequence
  Synthetic sequence
cgtctcgattcagatctaaaggatccaatctagagtttgcaatggttaatctattgttaaaatttaaagtttcacttgaactttcaaataatgttcttatatttgcagtgtcgaaagaaacaaaggactgatcacacaacatttaaaaaataacattatgaaagcactcgaaaagagattcaaaggtaatattaacaataatttattttcaatggtttcgaaaggggaagaagataacatggctatcattaaggagtttatgcgcttcaaggtgcacatggagggctctgtcaacggccacgagttcgaaatcgaaggtgaaggtgaaggtcgtccgtacgaaggtactcagaccgcaaagttgaaagttacaaaaggaggtccgttgcctttcgcttgggacattctgagcccgcaatttatgtacgggagcaaagcctatgttaaacatccggcggatattcccgattacctgaaactgtcattcccggaggggttcaagtgggaacgcgtcatgaactttgaagacggtggcgtggttacagtgactcaggattcgtcccttcaagatggcgaatttatctacaaagtcaaactgcgcgggacaaattttccgagtgacggtcctgttatgcagaagaagaccatggggtgggaagcaagctccgaacgcatgtaccccgaggacggtgcactcaaaggagaaatcaagcagcgtctgaaactgaaagatggcgggcactacgatgcagaagtgaaaaccacctataaggcgaaaaagcctgtacaactgccgggtgcctataatgtgaacattaaactggatataacgagtcacaacgaagactatacaatcgtcgagcagtatgagcgtgcggaaggacgtcattccactggtggaatggatgaactgtataagtaaatcctagctgattagctcgagaaggccatcctgacggatggccttttttttgtatcgagacgactagtgtaattgcctatcttccagtgatggaacagcatttgtgcattggctgcaacaatcagccttacttgtgcctgttctatttccgaaccgaccgcttgtatgaatccatcaaaattcgttttctctatgttggattccttgttgctcatattgtgatgataatttctacaaatatagtcattggtaactatctatgaaactgtttgatacttttatagttgattaaacttgttcatggcatttgccttaatatcatccgctatgtcaatgtagggtttcatagctttgtagtcgctgtgtcccgtccatttcatgaccacctgtgccgggattccgagagccagcgcattgcagatgaatgtccttcttcctgcatgggtactgagcaaagcgtatttgggtgtgacttcatcaatacgttcatttcccttgtagtaggtttcccgtacaggctcgttgatttctgccagttcgcccagctctttcaggtaatcgttcatcttctggttgctgatgacgggcagagccatgtaattctcgaaatggatgtccttgtatttgtccagtatggctttgctgtatttgttcagttcaatcgtcaggctgtcggcagtcttgactgtggttatttcgatgtggtcggacttcacatcgcttcttttcagattgcgaacatccgaataccgcaaactcgtaaagcagcagaacaggaaaacatcacgcacacgttccaggtattgcttatccttgggtatctggtagtctttcagcttgttcagttcatcccaagtcaggaagattacttttttcgaggtggttttcagtttcggtttgaacgtatcgtatgcaatgttctgatgatgtcctttcttgaagctccagcgcaggaaccatttgaggaatcccatttgcttgccgatggtgctgtttctcatatccttggtgtcacgcaggaagttgacgtattcgttcaatccaaactcgttgaaatagttgaacgttgcatcctccttgaactctttgaggtggttcctcactgctgcaaatttttcataggtggatgccgtccagttattctggttaccgcactcttttacaaactcatcgaacacctcccaaaagctgacaggggcttcttccggctgttcttcgctggtgtctttcattctcatgttgaaagcttccttcaactgttgggtcgttggcatgacctcctgcacctcaaattccttgaaaatattctggatttcggcatagtatttcagcaagtccgtattgatttcggctgcactttgctttagcttgttggtacatccgctctttacccgctgcttatctgcatcccatttggctacgtcaatccggtagcccgttgtaaactcgatgcgttggctggcaaagatgacacgcatacggatgggtacgttctctacgattggcacaccgttctttttccggctctccaatgcaaaaatgatgttgcgcttgatattcataattgggtgcgtttgaaattctacacccaaatatacacccaattattgagatagcaaaagacatttagaaacatttacttttactctatattgtaatttacacttgattatcagtcgtttgcagtcttatgatattctgtgaaagtataagttcgagagcctgtctctccgcaaaaaacgctgaaaatcagcagattgcaaaacaaacaccctgttttacacccaagaatgtaaagtcggctgtttttgttttatttaagataatacaaccactacataataaaagagtagcgatattaaaagaatccgatgagaaaagactaatatttatctatccattcagtttgatttttcaggactttacatcgtcctgaaagtatttgttggtaccgaggacgcgacagctgcagacgcgttatgagtaaacttggtctgacagttaccaatgcttaatcagtgaggcacctatctcagcgatctgtctatttcgttcatccatagttgcctgactccccgtcgtgtagataactacgatacgggagggcttaccatctggccccagtgctgcaatgataccgcgggacccacgctcaccggctccagatttatcagcaataaaccagccagccggaagggccgagcgcagaagtggtcctgcaactttatccgcctccatccagtctattaattgttgccgggaagctagagtaagtagttcgccagttaatagtttgcgcaacgttgttgccattgctacaggcatcgtggtgtcacgctcgtcgtttggtatggcttcattcagctccggttcccaacgatcaaggcgagttacatgatcccccatgttgtgcaaaaaagcggttagctccttcggtcctccgatcgttgtcagaagtaagttggccgcagtgttatcactcatggttatggcagcactgcataattctcttactgtcatgccatccgtaagatgcttttctgtgactggtgagtactcaaccaagtcattctgagaatagtgtatgcggcgaccgagttgctcttgcccggcgtcaatacgggataataccgcgccacatagcagaactttaaaagtgctcatcattggaaaacgttcttcggggcgaaaactctcaaggatcttaccgctgttgagatccagttcgatgtaacccactcgtgcacccaactgatcttcagcatcttttactttcaccagcgtttctgggtgagcaaaaacaggaaggcaaaatgccgcaaaaaagggaataagggcgacacggaaatgttgaatactcatactcttcctttttcaatcatggccgcgggattaaaagtcggggattggtgaacaaaaaggtgtttctctctttaagagaaatatcgttttgctaaacagttgatattgaggtatcattttatcgtaaaagacatttttgctcaacaattgcttgacggaaatcaacaaattttagcattttgtaaaaaagtcgctatataatttggtgaattggagttattttcatatttttgcatcccgaagagtttctcttaaagagagaaacatcttttgcataccttttccgaccgaatttttatgtcgtaaagaggggctttgcagggggtggactcagaaagatgagaatagatgactattgtagttgaaacacatagaaagttgctgatatacagaccgatacgcatatcgggatgaaccatgagtacgttcttttctcaaaaaacataaatattcgaaaagagatgcaataaattaaggagaggttataatgaacaaagtaaatataaaagatagtcaaaattttattacttcaaaatatcacatagaaaaaataatgaattgcataagtttagatgaaaaagataacatctttgaaataggtgcagggaaaggtcattttactgctggattggtaaagagatgtaattttgtaacggcgatagaaattgattctaaattatgtgaggtaactcgtaataagctcttaaattatcctaactatcaaatagtaaatgatgatatactgaaatttacatttcctagccacaatccatataaaatatttggcagcataccttacaacataagcacaaatataattcgaaaaattgtttttgaaagttcagccacaataagttatttaatagtggaatatggttttgctaaaatgttattagatacaaacagatcactagcattgctgttaatggcagaggtagatatttctatattagcaaaaattcctaggtattatttccatccaaaacctaaagtggatagcacattaattgtattaaaaagaaagccagcaaaaatggcatttaaagagagaaaaaaatatgaaacttttgtaatgaaatgggttaacaaagagtacgaaaaactgtttacaaaaaatcaatttaataaagctttaaaacatgcgagaatatatgatataaacaatattagtttcgaacaatttgtatcgctatttaatagttataaaatatttaacggctaaaaacaataggccacatgcaactgtaaatgtttacgcgggtaccgacaccgcggtggaggggaattcccatgtcagccgttaagtgttcctgtgtcactcaaaattgctttgagaggctctaagggcttctcagtgcgttacatccctggcttgttgtccacaaccgttaaaccttaaaagctttaaaagccttatatattcttttttttcttataaaacttaaaaccttagaggctatttaagttgctgatttatattaattttattgttcaaacatgagagcttagtacgtgaaacatgagagcttagtacgttagccatgagagcttagtacgttagccatgagggtttagttcgttaaacatgagagcttagtacgttaaacatgagagcttagtacgtgaaacatgagagcttagtacgtactatcaacaggttgaactgctgatcttcagatcctctacgccggacgcatcgtggccggatcaattccgttttccgctgcataaccctgcttcggggtcattatagcgattttttcggtatatccatcctttttcgcacgatatacaggattttgccaaagggttcgtgtagactttccttggtgtatccaacggcgtcagccgggcaggataggtgaagtaggcccacccgcgagcgggtgttccttcttcactgtcccttattcgcacctggcggtgctcaacgggaatcctgctctgcgaggctggccggctaccgccggcgtaacagatgagggcaagcggatggctgatgaaaccaagccaaccaggaagggcagcccacctatcacggaattgatccccctcgaattggaattcgttc

SEQ ID NO: 146 - DNA, 6987 bp, Artificial sequence
  Synthetic sequence
gaattcgttccgtctcgattcagatctaaaggatccaatctagataaaacgaaaggctcagtcgaaagactgggcctttcgttttacaattgggctaccttttttttgttttgtttgcaatggttaatctattgttaaaatttaaagtttcacttgaactttcaaataatgttcttatatttccagtgtcgaaagaaacaaagtaggactgatcacacaacatttaaaaaataacattatgaaagcactcgaaaagagattcaaaggtaatattaacaataatttattttcaatgcgtaaaggcgaagagctgttcactggtgtcgtccctattctggtggaactggatggtgatgtcaacggtcataagttttccgtgcgtggcgagggtgaaggtgacgcaactaatggtaaactgacgctgaagttcatctgtactactggtaaactgccggttccttggccgactctggtaacgacgctgacttatggtgttcagtgctttgctcgttatccggaccatatgaagcagcatgacttcttcaagtccgccatgccggaaggctatgtgcaggaacgcacgatttcctttaaggatgacggcacgtacaaaacgcgtgcggaagtgaaatttgaaggcgataccctggtaaaccgcattgagctgaaaggcattgactttaaagaagacggcaatatcctgggccataagctggaatacaattttaacagccacaatgtttacatcaccgccgataaacaaaaaaatggcattaaagcgaattttaaaattcgccacaacgtggaggatggcagcgtgcagctggctgatcactaccagcaaaacactccaatcggtgatggtcctgttctgctgccagacaatcactatctgagcacgcaaagcgttctgtctaaagatccgaacgagaaacgcgatcatatggttctgctggagttcgtaaccgcagcgggcatcacgcatggtatggatgaactgtacaaaggatctgattacaaggacgatgatgataaggactacaaagatgatgatgacaaagattataaggacgatgatgataaaggtcatcatcatcatcatcactaaatcctagctgattagctcgagaaggccatcctgacggatggccttttttttgtatcgagacgactagagtttgcaatggttaatctattgttaaaatttaaagtttcacttgaactttcaaataatgttcttatatttgcagtgtcgaaagaaacaaaggactgatcacacaacatttaaaaaataacattatgaaagcactcgaaaagagattcaaaggtaatattaacaataatttattttcaatggtttcgaaaggggaagaagataacatggctatcattaaggagtttatgcgcttcaaggtgcacatggagggctctgtcaacggccacgagttcgaaatcgaaggtgaaggtgaaggtcgtccgtacgaaggtactcagaccgcaaagttgaaagttacaaaaggaggtccgttgcctttcgcttgggacattctgagcccgcaatttatgtacgggagcaaagcctatgttaaacatccggcggatattcccgattacctgaaactgtcattcccggaggggttcaagtgggaacgcgtcatgaactttgaagacggtggcgtggttacagtgactcaggattcgtcccttcaagatggcgaatttatctacaaagtcaaactgcgcgggacaaattttccgagtgacggtcctgttatgcagaagaagaccatggggtgggaagcaagctccgaacgcatgtaccccgaggacggtgcactcaaaggagaaatcaagcagcgtctgaaactgaaagatggcgggcactacgatgcagaagtgaaaaccacctataaggcgaaaaagcctgtacaactgccgggtgcctataatgtgaacattaaactggatataacgagtcacaacgaagactatacaatcgtcgagcagtatgagcgtgcggaaggacgtcattccactggtggaatggatgaactgtataagtaaatcctagctgattagctcgagaaggccatcctgacggatggccttttttttgtatcgagacgactagtgtaattgcctatcttccagtgatggaacagcatttgtgcattggctgcaacaatcagccttacttgtgcctgttctatttccgaaccgaccgcttgtatgaatccatcaaaattcgttttctctatgttggattccttgttgctcatattgtgatgataatttctacaaatatagtcattggtaactatctatgaaactgtttgatacttttatagttgattaaacttgttcatggcatttgccttaatatcatccgctatgtcaatgtagggtttcatagctttgtagtcgctgtgtcccgtccatttcatgaccacctgtgccgggattccgagagccagcgcattgcagatgaatgtccttcttcctgcatgggtactgagcaaagcgtatttgggtgtgacttcatcaatacgttcatttcccttgtagtaggtttcccgtacaggctcgttgatttctgccagttcgcccagctctttcaggtaatcgttcatcttctggttgctgatgacgggcagagccatgtaattctcgaaatggatgtccttgtatttgtccagtatggctttgctgtatttgttcagttcaatcgtcaggctgtcggcagtcttgactgtggttatttcgatgtggtcggacttcacatcgcttcttttcagattgcgaacatccgaataccgcaaactcgtaaagcagcagaacaggaaaacatcacgcacacgttccaggtattgcttatccttgggtatctggtagtctttcagcttgttcagttcatcccaagtcaggaagattacttttttcgaggtggttttcagtttcggtttgaacgtatcgtatgcaatgttctgatgatgtcctttcttgaagctccagcgcaggaaccatttgaggaatcccatttgcttgccgatggtgctgtttctcatatccttggtgtcacgcaggaagttgacgtattcgttcaatccaaactcgttgaaatagttgaacgttgcatcctccttgaactctttgaggtggttcctcactgctgcaaatttttcataggtggatgccgtccagttattctggttaccgcactcttttacaaactcatcgaacacctcccaaaagctgacaggggcttcttccggctgttcttcgctggtgtctttcattctcatgttgaaagcttccttcaactgttgggtcgttggcatgacctcctgcacctcaaattccttgaaaatattctggatttcggcatagtatttcagcaagtccgtattgatttcggctgcactttgctttagcttgttggtacatccgctctttacccgctgcttatctgcatcccatttggctacgtcaatccggtagcccgttgtaaactcgatgcgttggctggcaaagatgacacgcatacggatgggtacgttctctacgattggcacaccgttctttttccggctctccaatgcaaaaatgatgttgcgcttgatattcataattgggtgcgtttgaaattctacacccaaatatacacccaattattgagatagcaaaagacatttagaaacatttacttttactctatattgtaatttacacttgattatcagtcgtttgcagtcttatgatattctgtgaaagtataagttcgagagcctgtctctccgcaaaaaacgctgaaaatcagcagattgcaaaacaaacaccctgttttacacccaagaatgtaaagtcggctgtttttgttttatttaagataatacaaccactacataataaaagagtagcgatattaaaagaatccgatgagaaaagactaatatttatctatccattcagtttgatttttcaggactttacatcgtcctgaaagtatttgttggtaccgaggacgcgacagctgcagacgcgttatgagtaaacttggtctgacagttaccaatgcttaatcagtgaggcacctatctcagcgatctgtctatttcgttcatccatagttgcctgactccccgtcgtgtagataactacgatacgggagggcttaccatctggccccagtgctgcaatgataccgcgggacccacgctcaccggctccagatttatcagcaataaaccagccagccggaagggccgagcgcagaagtggtcctgcaactttatccgcctccatccagtctattaattgttgccgggaagctagagtaagtagttcgccagttaatagtttgcgcaacgttgttgccattgctacaggcatcgtggtgtcacgctcgtcgtttggtatggcttcattcagctccggttcccaacgatcaaggcgagttacatgatcccccatgttgtgcaaaaaagcggttagctccttcggtcctccgatcgttgtcagaagtaagttggccgcagtgttatcactcatggttatggcagcactgcataattctcttactgtcatgccatccgtaagatgcttttctgtgactggtgagtactcaaccaagtcattctgagaatagtgtatgcggcgaccgagttgctcttgcccggcgtcaatacgggataataccgcgccacatagcagaactttaaaagtgctcatcattggaaaacgttcttcggggcgaaaactctcaaggatcttaccgctgttgagatccagttcgatgtaacccactcgtgcacccaactgatcttcagcatcttttactttcaccagcgtttctgggtgagcaaaaacaggaaggcaaaatgccgcaaaaaagggaataagggcgacacggaaatgttgaatactcatactcttcctttttcaatcatggccgcgggattaaaagtcggggattggtgaacaaaaaggtgtttctctctttaagagaaatatcgttttgctaaacagttgatattgaggtatcattttatcgtaaaagacatttttgctcaacaattgcttgacggaaatcaacaaattttagcattttgtaaaaaagtcgctatataatttggtgaattggagttattttcatatttttgcatcccgaagagtttctcttaaagagagaaacatcttttgcataccttttccgaccgaatttttatgtcgtaaagaggggctttgcagggggtggactcagaaagatgagaatagatgactattgtagttgaaacacatagaaagttgctgatatacagaccgatacgcatatcgggatgaaccatgagtacgttcttttctcaaaaaacataaatattcgaaaagagatgcaataaattaaggagaggttataatgaacaaagtaaatataaaagatagtcaaaattttattacttcaaaatatcacatagaaaaaataatgaattgcataagtttagatgaaaaagataacatctttgaaataggtgcagggaaaggtcattttactgctggattggtaaagagatgtaattttgtaacggcgatagaaattgattctaaattatgtgaggtaactcgtaataagctcttaaattatcctaactatcaaatagtaaatgatgatatactgaaatttacatttcctagccacaatccatataaaatatttggcagcataccttacaacataagcacaaatataattcgaaaaattgtttttgaaagttcagccacaataagttatttaatagtggaatatggttttgctaaaatgttattagatacaaacagatcactagcattgctgttaatggcagaggtagatatttctatattagcaaaaattcctaggtattatttccatccaaaacctaaagtggatagcacattaattgtattaaaaagaaagccagcaaaaatggcatttaaagagagaaaaaaatatgaaacttttgtaatgaaatgggttaacaaagagtacgaaaaactgtttacaaaaaatcaatttaataaagctttaaaacatgcgagaatatatgatataaacaatattagtttcgaacaatttgtatcgctatttaatagttataaaatatttaacggctaaaaacaataggccacatgcaactgtaaatgtttacgcgggtaccgacaccgcggtggaggggaattcccatgtcagccgttaagtgttcctgtgtcactcaaaattgctttgagaggctctaagggcttctcagtgcgttacatccctggcttgttgtccacaaccgttaaaccttaaaagctttaaaagccttatatattcttttttttcttataaaacttaaaaccttagaggctatttaagttgctgatttatattaattttattgttcaaacatgagagcttagtacgtgaaacatgagagcttagtacgttagccatgagagcttagtacgttagccatgagggtttagttcgttaaacatgagagcttagtacgttaaacatgagagcttagtacgtgaaacatgagagcttagtacgtactatcaacaggttgaactgctgatcttcagatcctctacgccggacgcatcgtggccggatcaattccgttttccgctgcataaccctgcttcggggtcattatagcgattttttcggtatatccatcctttttcgcacgatatacaggattttgccaaagggttcgtgtagactttccttggtgtatccaacggcgtcagccgggcaggataggtgaagtaggcccacccgcgagcgggtgttccttcttcactgtcccttattcgcacctggcggtgctcaacgggaatcctgctctgcgaggctggccggctaccgccggcgtaacagatgagggcaagcggatggctgatgaaaccaagccaaccaggaagggcagcccacctatcacggaattgatccccctcgaattg

SEQ ID NO: 147 - DNA, 6987 bp, Artificial sequence
  Synthetic sequence
gaattcgttccgtctcgattcagatctaaaggatccaatctagataaaacgaaaggctcagtcgaaagactgggcctttcgttttacaattgggctaccttttttttgttttgtttgcaatggttaatctattgttaaaatttaaagtttcacttgaactttcaaataatgttcttatatttgcagtgtcgaaagaaacaaagtaggactgatcacacaacatttaaaaaataacattatgaaagcactcgaaaagagattcaaaggtaatattaacaataatttattttcaatgcgtaaaggcgaagagctgttcactggtgtcgtccctattctggtggaactggatggtgatgtcaacggtcataagttttccgtgcgtggcgagggtgaaggtgacgcaactaatggtaaactgacgctgaagttcatctgtactactggtaaactgccggttccttggccgactctggtaacgacgctgacttatggtgttcagtgctttgctcgttatccggaccatatgaagcagcatgacttcttcaagtccgccatgccggaaggctatgtgcaggaacgcacgatttcctttaaggatgacggcacgtacaaaacgcgtgcggaagtgaaatttgaaggcgataccctggtaaaccgcattgagctgaaaggcattgactttaaagaagacggcaatatcctgggccataagctggaatacaattttaacagccacaatgtttacatcaccgccgataaacaaaaaaatggcattaaagcgaattttaaaattcgccacaacgtggaggatggcagcgtgcagctggctgatcactaccagcaaaacactccaatcggtgatggtcctgttctgctgccagacaatcactatctgagcacgcaaagcgttctgtctaaagatccgaacgagaaacgcgatcatatggttctgctggagttcgtaaccgcagcgggcatcacgcatggtatggatgaactgtacaaaggatctgattacaaggacgatgatgataaggactacaaagatgatgatgacaaagattataaggacgatgatgataaaggtcatcatcatcatcatcactaaatcctagctgattagctcgagaaggccatcctgacggatggccttttttttgtatcgagacgactagagtttgcaatggttaatctattgttaaaatttaaagtttcacttgaactttcaaataatgttcttatatttgcagtgtcgaaagaaacaaaggactgatcacacaacatttaaaaaataacattatgaaagcactcgaaaagagattcaaaggtaatattaacaataatttattttcaatggtttcgaaaggggaagaagataacatggctatcattaaggagtttatgcgcttcaaggtgcacatggagggctctgtcaacggccacgagttcgaaatcgaaggtgaaggtgaaggtcgtccgtacgaaggtactcagaccgcaaagttgaaagttacaaaaggaggtccgttgcctttcgcttgggacattctgagcccgcaatttatgtacgggagcaaagcctatgttaaacatccggcggatattcccgattacctgaaactgtcattcccggaggggttcaagtgggaacgcgtcatgaactttgaagacggtggcgtggttacagtgactcaggattcgtcccttcaagatggcgaatttatctacaaagtcaaactgcgcgggacaaattttccgagtgacggtcctgttatgcagaagaagaccatggggtgggaagcaagctccgaacgcatgtaccccgaggacggtgcactcaaaggagaaatcaagcagcgtctgaaactgaaagatggcgggcactacgatgcagaagtgaaaaccacctataaggcgaaaaagcctgtacaactgccgggtgcctataatgtgaacattaaactggatataacgagtcacaacgaagactatacaatcgtcgagcagtatgagcgtgcggaaggacgtcattccactggtggaatggatgaactgtataagtaaatcctagctgattagctcgagaaggccatcctgacggatggccttttttttgtatcgagacgactagtgtaattgcctatcttccagtgatggaacagcatttgtgcattggctgcaacaatcagccttacttgtgcctgttctatttccgaaccgaccgcttgtatgaatccatcaaaattcgttttctctatgttggattccttgttgctcatattgtgatgataatttctacaaatatagtcattggtaactatctatgaaactgtttgatacttttatagttgattaaacttgttcatggcatttgccttaatatcatccgctatgtcaatgtagggtttcatagctttgtagtcgctgtgtcccgtccatttcatgaccacctgtgccgggattccgagagccagcgcattgcagatgaatgtccttcttcctgcatgggtactgagcaaagcgtatttgggtgtgacttcatcaatacgttcatttcccttgtagtaggtttcccgtacaggctcgttgatttctgccagttcgcccagctctttcaggtaatcgttcatcttctggttgctgatgacgggcagagccatgtaattctcgaaatggatgtccttgtatttgtccagtatggctttgctgtatttgttcagttcaatcgtcaggctgtcggcagtcttgactgtggttatttcgatgtggtcggacttcacatcgcttcttttcagattgcgaacatccgaataccgcaaactcgtaaagcagcagaacaggaaaacatcacgcacacgttccaggtattgcttatccttgggtatctggtagtctttcagcttgttcagttcatcccaagtcaggaagattacttttttcgaggtggttttcagtttcggtttgaacgtatcgtatgcaatgttctgatgatgtcctttcttgaagctccagcgcaggaaccatttgaggaatcccatttgcttgccgatggtgctgtttctcatatccttggtgtcacgcaggaagttgacgtattcgttcaatccaaactcgttgaaatagttgaacgttgcatcctccttgaactctttgaggtggttcctcactgctgcaaatttttcataggtggatgccgtccagttattctggttaccgcactcttttacaaactcatcgaacacctcccaaaagctgacaggggcttcttccggctgttcttcgctggtgtctttcattctcatgttgaaagcttccttcaactgttgggtcgttggcatgacctcctgcacctcaaattccttgaaaatattctggatttcggcatagtatttcagcaagtccgtattgatttcggctgcactttgctttagcttgttggtacatccgctctttacccgctgcttatctgcatcccatttggctacgtcaatccggtagcccgttgtaaactcgatgcgttggctggcaaagatgacacgcatacggatgggtacgttctctacgattggcacaccgttctttttccggctctccaatgcaaaaatgatgttgcgcttgatattcataattgggtgcgtttgaaattctacacccaaatatacacccaattattgagatagcaaaagacatttagaaacatttacttttactctatattgtaatttacacttgattatcagtcgtttgcagtcttatgatattctgtgaaagtataagttcgagagcctgtctctccgcaaaaaacgctgaaaatcagcagattgcaaaacaaacaccctgttttacacccaagaatgtaaagtcggctgtttttgttttatttaagataatacaaccactacataataaaagagtagcgatattaaaagaatccgatgagaaaagactaatatttatctatccattcagtttgatttttcaggactttacatcgtcctgaaagtatttgttggtaccgaggacgcgacagctgcagacgcgttatgagtaaacttggtctgacagttaccaatgcttaatcagtgaggcacctatctcagcgatctgtctatttcgttcatccatagttgcctgactccccgtcgtgtagataactacgatacgggagggcttaccatctggccccagtgctgcaatgataccgcgggacccacgctcaccggctccagatttatcagcaataaaccagccagccggaagggccgagcgcagaagtggtcctgcaactttatccgcctccatccagtctattaattgttgccgggaagctagagtaagtagttcgccagttaatagtttgcgcaacgttgttgccattgctacaggcatcgtggtgtcacgctcgtcgtttggtatggcttcattcagctccggttcccaacgatcaaggcgagttacatgatcccccatgttgtgcaaaaaagcggttagctccttcggtcctccgatcgttgtcagaagtaagttggccgcagtgttatcactcatggttatggcagcactgcataattctcttactgtcatgccatccgtaagatgcttttctgtgactggtgagtactcaaccaagtcattctgagaatagtgtatgcggcgaccgagttgctcttgcccggcgtcaatacgggataataccgcgccacatagcagaactttaaaagtgctcatcattggaaaacgttcttcggggcgaaaactctcaaggatcttaccgctgttgagatccagttcgatgtaacccactcgtgcacccaactgatcttcagcatcttttactttcaccagcgtttctgggtgagcaaaaacaggaaggcaaaatgccgcaaaaaagggaataagggcgacacggaaatgttgaatactcatactcttcctttttcaatcatggccgcgggattaaaagtcggggattggtgaacaaaaaggtgtttctctctttaagagaaatatcgttttgctaaacagttgatattgaggtatcattttatcgtaaaagacatttttgctcaacaattgcttgacggaaatcaacaaattttagcattttgtaaaaaagtcgctatataatttggtgaattggagttattttcatatttttgcatcccgaagagtttctcttaaagagagaaacatcttttgcataccttttccgaccgaatttttatgtcgtaaagaggggctttgcagggggtggactcagaaagatgagaatagatgactattgtagttgaaacacatagaaagttgctgatatacagaccgatacgcatatcgggatgaaccatgagtacgttcttttctcaaaaaacataaatattcgaaaagagatgcaataaattaaggagaggttataatgaacaaagtaaatataaaagatagtcaaaattttattacttcaaaatatcacatagaaaaaataatgaattgcataagtttagatgaaaaagataacatctttgaaataggtgcagggaaaggtcattttactgctggattggtaaagagatgtaattttgtaacggcgatagaaattgattctaaattatgtgaggtaactcgtaataagctcttaaattatcctaactatcaaatagtaaatgatgatatactgaaatttacatttcctagccacaatccatataaaatatttggcagcataccttacaacataagcacaaatataattcgaaaaattgtttttgaaagttcagccacaataagttatttaatagtggaatatggttttgctaaaatgttattagatacaaacagatcactagcattgctgttaatggcagaggtagatatttctatattagcaaaaattcctaggtattatttccatccaaaacctaaagtggatagcacattaattgtattaaaaagaaagccagcaaaaatggcatttaaagagagaaaaaaatatgaaacttttgtaatgaaatgggttaacaaagagtacgaaaaactgtttacaaaaaatcaatttaataaagctttaaaacatgcgagaatatatgatataaacaatattagtttcgaacaatttgtatcgctatttaatagttataaaatatttaacggctaaaaacaataggccacatgcaactgtaaatgtttacgcgggtaccgacaccgcggtggaggggaattcccatgtcagccgttaagtgttcctgtgtcactcaaaattgctttgagaggctctaagggcttctcagtgcgttacatccctggcttgttgtccacaaccgttaaaccttaaaagctttaaaagccttatatattcttttttttcttataaaacttaaaaccttagaggctatttaagttgctgatttatattaattttattgttcaaacatgagagcttagtacgtgaaacatgagagcttagtacgttagccatgagagcttagtacgttagccatgagggtttagttcgttaaacatgagagcttagtacgttaaacatgagagcttagtacgtgaaacatgagagcttagtacgtactatcaacaggttgaactgctgatcttcagatcctctacgccggacgcatcgtggccggatcaattccgttttccgctgcataaccctgcttcggggtcattatagcgattttttcggtatatccatcctttttcgcacgatatacaggattttgccaaagggttcgtgtagactttccttggtgtatccaacggcgtcagccgggcaggataggtgaagtaggcccacccgcgagcgggtgttccttcttcactgtcccttattcgcacctggcggtgctcaacgggaatcctgctctgcgaggctggccggctaccgccggcgtaacagatgagggcaagcggatggctgatgaaaccaagccaaccaggaagggcagcccacctatcacggaattgatccccctcgaattg

SEQ ID NO: 148 - DNA, 6031 bp, Artificial sequence
  Synthetic sequence
caccgcggtggaggggaattcccatgtcagccgttaagtgttcctgtgtcactcaaaattgctttgagaggctctaagggcttctcagtgcgttacatccctggcttgttgtccacaaccgttaaaccttaaaagctttaaaagccttatatattcttttttttcttataaaacttaaaaccttagaggctatttaagttgctgatttatattaattttattgttcaaacatgagagcttagtacgtgaaacatgagagcttagtacgttagccatgagagcttagtacgttagccatgagggtttagttcgttaaacatgagagcttagtacgttaaacatgagagcttagtacgtgaaacatgagagcttagtacgtactatcaacaggttgaactgctgatcttcagatcctctacgccggacgcatcgtggccggatcaattccgttttccgctgcataaccctgcttcggggtcattatagcgattttttcggtatatccatcctttttcgcacgatatacaggattttgccaaagggttcgtgtagactttccttggtgtatccaacggcgtcagccgggcaggataggtgaagtaggcccacccgcgagcgggtgttccttcttcactgtcccttattcgcacctggcggtgctcaacgggaatcctgctctgcgaggctggccggctaccgccggcgtaacagatgagggcaagcggatggctgatgaaaccaagccaaccaggaagggcagcccacctatcacggaattgatccccctcgaattggaattcgttccgtctcgattcagatctaaaggatccaatctagataaaacgaaaggctcagtcgaaagactgggcctttcgttttacaattgggctaccttttttttgttttgtttgcaatggttaatctattgttaaaatttaaagtttcacttgaactttcaaataatgttcttatatttccagtgtcgaaagaaacaaagtaggactgatcacacaacatttaaaaaataacattatgaaagcactcgaaaagagattcaaaggtaatattaacaataatttattttcaatgcgtaaaggcgaagagctgttcactggtgtcgtccctattctggtggaactggatggtgatgtcaacggtcataagttttccgtgcgtggcgagggtgaaggtgacgcaactaatggtaaactgacgctgaagttcatctgtactactggtaaactgccggttccttggccgactctggtaacgacgctgacttatggtgttcagtgctttgctcgttatccggaccatatgaagcagcatgacttcttcaagtccgccatgccggaaggctatgtgcaggaacgcacgatttcctttaaggatgacggcacgtacaaaacgcgtgcggaagtgaaatttgaaggcgataccctggtaaaccgcattgagctgaaaggcattgactttaaagaagacggcaatatcctgggccataagctggaatacaattttaacagccacaatgtttacatcaccgccgataaacaaaaaaatggcattaaagcgaattttaaaattcgccacaacgtggaggatggcagcgtgcagctggctgatcactaccagcaaaacactccaatcggtgatggtcctgttctgctgccagacaatcactatctgagcacgcaaagcgttctgtctaaagatccgaacgagaaacgcgatcatatggttctgctggagttcgtaaccgcagcgggcatcacgcatggtatggatgaactgtacaaaggatctgattacaaggacgatgatgataaggactacaaagatgatgatgacaaagattataaggacgatgatgataaaggtcatcatcatcatcatcactaaatcctagctgattagctcgagaaggccatcctgacggatggccttttttttgtatcgagacgactagtgtaattgcctatcttccagtgatggaacagcatttgtgcattggctgcaacaatcagccttacttgtgcctgttctatttccgaaccgaccgcttgtatgaatccatcaaaattcgttttctctatgttggattccttgttgctcatattgtgatgataatttctacaaatatagtcattggtaactatctatgaaactgtttgatacttttatagttgattaaacttgttcatggcatttgccttaatatcatccgctatgtcaatgtagggtttcatagctttgtagtcgctgtgtcccgtccatttcatgaccacctgtgccgggattccgagagccagcgcattgcagatgaatgtccttcttcctgcatgggtactgagcaaagcgtatttgggtgtgacttcatcaatacgttcatttcccttgtagtaggtttcccgtacaggctcgttgatttctgccagttcgcccagctctttcaggtaatcgttcatcttctggttgctgatgacgggcagagccatgtaattctcgaaatggatgtccttgtatttgtccagtatggctttgctgtatttgttcagttcaatcgtcaggctgtcggcagtcttgactgtggttatttcgatgtggtcggacttcacatcgcttcttttcagattgcgaacatccgaataccgcaaactcgtaaagcagcagaacaggaaaacatcacgcacacgttccaggtattgcttatccttgggtatctggtagtctttcagcttgttcagttcatcccaagtcaggaagattacttttttcgaggtggttttcagtttcggtttgaacgtatcgtatgcaatgttctgatgatgtcctttcttgaagctccagcgcaggaaccatttgaggaatcccatttgcttgccgatggtgctgtttctcatatccttggtgtcacgcaggaagttgacgtattcgttcaatccaaactcgttgaaatagttgaacgttgcatcctccttgaactctttgaggtggttcctcactgctgcaaatttttcataggtggatgccgtccagttattctggttaccgcactcttttacaaactcatcgaacacctcccaaaagctgacaggggcttcttccggctgttcttcgctggtgtctttcattctcatgttgaaagcttccttcaactgttgggtcgttggcatgacctcctgcacctcaaattccttgaaaatattctggatttcggcatagtatttcagcaagtccgtattgatttcggctgcactttgctttagcttgttggtacatccgctctttacccgctgcttatctgcatcccatttggctacgtcaatccggtagcccgttgtaaactcgatgcgttggctggcaaagatgacacgcatacggatgggtacgttctctacgattggcacaccgttctttttccggctctccaatgcaaaaatgatgttgcgcttgatattcataattgggtgcgtttgaaattctacacccaaatatacacccaattattgagatagcaaaagacatttagaaacatttacttttactctatattgtaatttacacttgattatcagtcgtttgcagtcttatgatattctgtgaaagtataagttcgagagcctgtctctccgcaaaaaacgctgaaaatcagcagattgcaaaacaaacaccctgttttacacccaagaatgtaaagtcggctgtttttgttttatttaagataatacaaccactacataataaaagagtagcgatattaaaagaatccgatgagaaaagactaatatttatctatccattcagtttgatttttcaggactttacatcgtcctgaaagtatttgttggtaccgaggacgcgacagctgcagacgcgttatgagtaaacttggtctgacagttaccaatgcttaatcagtgaggcacctatctcagcgatctgtctatttcgttcatccatagttgcctgactccccgtcgtgtagataactacgatacgggagggcttaccatctggccccagtgctgcaatgataccgcgggacccacgctcaccggctccagatttatcagcaataaaccagccagccggaagggccgagcgcagaagtggtcctgcaactttatccgcctccatccagtctattaattgttgccgggaagctagagtaagtagttcgccagttaatagtttgcgcaacgttgttgccattgctacaggcatcgtggtgtcacgctcgtcgtttggtatggcttcattcagctccggttcccaacgatcaaggcgagttacatgatcccccatgttgtgcaaaaaagcggttagctccttcggtcctccgatcgttgtcagaagtaagttggccgcagtgttatcactcatggttatggcagcactgcataattctcttactgtcatgccatccgtaagatgcttttctgtgactggtgagtactcaaccaagtcattctgagaatagtgtatgcggcgaccgagttgctcttgcccggcgtcaatacgggataataccgcgccacatagcagaactttaaaagtgctcatcattggaaaacgttcttcggggcgaaaactctcaaggatcttaccgctgttgagatccagttcgatgtaacccactcgtgcacccaactgatcttcagcatcttttactttcaccagcgtttctgggtgagcaaaaacaggaaggcaaaatgccgcaaaaaagggaataagggcgacacggaaatgttgaatactcatactcttcctttttcaatcatggccgcgggattaaaagtcggggattggtgaacaaaaaggtgtttctctctttaagagaaatatcgttttgctaaacagttgatattgaggtatcattttatcgtaaaagacatttttgctcaacaattgcttgacggaaatcaacaaattttagcattttgtaaaaaagtcgctatataatttggtgaattggagttattttcatatttttgcatcccgaagagtttctcttaaagagagaaacatcttttgcataccttttccgaccgaatttttatgtcgtaaagaggggctttgcagggggtggactcagaaagatgagaatagatgactattgtagttgaaacacatagaaagttgctgatatacagaccgatacgcatatcgggatgaaccatgagtacgttcttttctcaaaaaacataaatattcgaaaagagatgcaataaattaaggagaggttataatgaacaaagtaaatataaaagatagtcaaaattttattacttcaaaatatcacatagaaaaaataatgaattgcataagtttagatgaaaaagataacatctttgaaataggtgcagggaaaggtcattttactgctggattggtaaagagatgtaattttgtaacggcgatagaaattgattctaaattatgtgaggtaactcgtaataagctcttaaattatcctaactatcaaatagtaaatgatgatatactgaaatttacatttcctagccacaatccatataaaatatttggcagcataccttacaacataagcacaaatataattcgaaaaattgtttttgaaagttcagccacaataagttatttaatagtggaatatggttttgctaaaatgttattagatacaaacagatcactagcattgctgttaatggcagaggtagatatttctatattagcaaaaattcctaggtattatttccatccaaaacctaaagtggatagcacattaattgtattaaaaagaaagccagcaaaaatggcatttaaagagagaaaaaaatatgaaacttttgtaatgaaatgggttaacaaagagtacgaaaaactgtttacaaaaaatcaatttaataaagctttaaaacatgcgagaatatatgatataaacaatattagtttcgaacaatttgtatcgctatttaatagttataaaatatttaacggctaaaaacaataggccacatgcaactgtaaatgtttacgcgggtaccga

SEQ ID NO: 149 - protein, 4 aa, Artificial sequence
  Synthetic sequence
AAAA

SEQ ID NO: 150 - DNA, 120 bp, Artificial sequence; identical to SEQ ID NO: 8
  Synthetic sequence

SEQ ID NO: 151 - DNA, 120 bp, Artificial sequence
  Synthetic sequence
caattgggctaccttttttttgttatgtttgcaatggttaatctattgttaaaatttaaagtttcacttgaactttcaaataatgttcttatatttgcagtgtcgaaagaaacaaagtag

SEQ ID NO: 152 - DNA, 120 bp, Artificial sequence
  Synthetic sequence
caattgggctaccttttttttgttctgtttgcaatggttaatctattgttaaaatttaaagtttcacttgaactttcaaataatgttcttatatttgcagtgtcgaaagaaacaaagtag

SEQ ID NO: 153 - DNA, 120 bp, Artificial sequence
  Synthetic sequence
caattgggctaccttttttttgttgtgtttgcaatggttaatctattgttaaaatttaaagtttcacttgaactttcaaataatgttcttatatttgcagtgtcgaaagaaacaaagtag

SEQ ID NO: 154 - DNA, 120 bp, Artificial sequence
  Synthetic sequence
caattgggctaccttttttttgtttagtttgcaatggttaatctattgttaaaatttaaagtttcacttgaactttcaaataatgttcttatatttgcagtgtcgaaagaaacaaagtag

SEQ ID NO: 155 - DNA, 120 bp, Artificial sequence
  Synthetic sequence
caattgggctaccttttttttgtttcgtttgcaatggttaatctattgttaaaatttaaagtttcacttgaactttcaaataatgttcttatatttgcagtgtcgaaagaaacaaagtag

SEQ ID NO: 156 - DNA, 120 bp, Artificial sequence
  Synthetic sequence
caattgggctaccttttttttgtttggtttgcaatggttaatctattgttaaaatttaaagtttcacttgaactttcaaataatgttcttatatttgcagtgtcgaaagaaacaaagtag

SEQ ID NO: 157 - DNA, 120 bp, Artificial sequence
  Synthetic sequence
caattgggctaccttttttttgttttatttgcaatggttaatctattgttaaaatttaaagtttcacttgaactttcaaataatgttcttatatttgcagtgtcgaaagaaacaaagtag

SEQ ID NO: 158 - DNA, 120 bp, Artificial sequence
  Synthetic sequence
caattgggctaccttttttttgttttctttgcaatggttaatctattgttaaaatttaaagtttcacttgaactttcaaataatgttcttatatttgcagtgtcgaaagaaacaaagtag

SEQ ID NO: 159 - DNA, 120 bp, Artificial sequence
  Synthetic sequence
caattgggctaccttttttttgttttttttgcaatggttaatctattgttaaaatttaaagtttcacttgaactttcaaataatgttcttatatttgcagtgtcgaaagaaacaaagtag

SEQ ID NO: 160 - DNA, 120 bp, Artificial sequence
  Synthetic sequence
caattgggctaccttttttttgttttgcttgcaatggttaatctattgttaaaatttaaagtttcacttgaactttcaaataatgttcttatatttgcagtgtcgaaagaaacaaagtag

SEQ ID NO: 161 - DNA, 120 bp, Artificial sequence
  Synthetic sequence
caattgggctaccttttttttgttttggttgcaatggttaatctattgttaaaatttaaagtttcacttgaactttcaaataatgttcttatatttgcagtgtcgaaagaaacaaagtag

SEQ ID NO: 162 - DNA, 120 bp, Artificial sequence
  Synthetic sequence
caattgggctaccttttttttgttttgtatgcaatggttaatctattgttaaaatttaaagtttcacttgaactttcaaataatgttcttatatttgcagtgtcgaaagaaacaaagtag

SEQ ID NO: 163 - DNA, 120 bp, Artificial sequence
  Synthetic sequence
caattgggctaccttttttttgttttgtctgcaatggttaatctattgttaaaatttaaagtttcacttgaactttcaaataatgttcttatatttgcagtgtcgaaagaaacaaagtag

SEQ ID NO: 164 - DNA, 120 bp, Artificial sequence
  Synthetic sequence
caattgggctaccttttttttgttttgtgtgcaatggttaatctattgttaaaatttaaagtttcacttgaactttcaaataatgttcttatatttgcagtgtcgaaagaaacaaagtag

SEQ ID NO: 165 - DNA, 120 bp, Artificial sequence
  Synthetic sequence
caattgggctaccttttttttgttttgttagcaatggttaatctattgttaaaatttaaagtttcacttgaactttcaaataatgttcttatatttgcagtgtcgaaagaaacaaagtag

SEQ ID NO: 166 - DNA, 120 bp, Artificial sequence
  Synthetic sequence
caattgggctaccttttttttgttttgttcgcaatggttaatctattgttaaaatttaaagtttcacttgaactttcaaataatgttcttatatttgcagtgtcgaaagaaacaaagtag

SEQ ID NO: 167 - DNA, 120 bp, Artificial sequence
  Synthetic sequence
caattgggctaccttttttttgttttgttggcaatggttaatctattgttaaaatttaaagtttcacttgaactttcaaataatgttcttatatttgcagtgtcgaaagaaacaaagtag

SEQ ID NO: 168 - DNA, 120 bp, Artificial sequence
  Synthetic sequence
caattgggctaccttttttttgttttgtttacaatggttaatctattgttaaaatttaaagtttcacttgaactttcaaataatgttcttatatttgcagtgtcgaaagaaacaaagtag

SEQ ID NO: 169 - DNA, 120 bp, Artificial sequence
  Synthetic sequence
caattgggctaccttttttttgttttgtttccaatggttaatctattgttaaaatttaaagtttcacttgaactttcaaataatgttcttatatttgcagtgtcgaaagaaacaaagtag

SEQ ID NO: 170 - DNA, 120 bp, Artificial sequence
  Synthetic sequence
caattgggctaccttttttttgttttgttttcaatggttaatctattgttaaaatttaaagtttcacttgaactttcaaataatgttcttatatttgcagtgtcgaaagaaacaaagtag

SEQ ID NO: 171 - DNA, 120 bp, Artificial sequence
  Synthetic sequence
caattgggctaccttttttttgttttgtttgaaatggttaatctattgttaaaatttaaagtttcacttgaactttcaaataatgttcttatatttgcagtgtcgaaagaaacaaagtag

SEQ ID NO: 172 - DNA, 120 bp, Artificial sequence
  Synthetic sequence
caattgggctaccttttttttgttttgtttggaatggttaatctattgttaaaatttaaagtttcacttgaactttcaaataatgttcttatatttgcagtgtcgaaagaaacaaagtag

SEQ ID NO: 173 - DNA, 120 bp, Artificial sequence
  Synthetic sequence
caattgggctaccttttttttgttttgtttgtaatggttaatctattgttaaaatttaaagtttcacttgaactttcaaataatgttcttatatttgcagtgtcgaaagaaacaaagtag

SEQ ID NO: 174 - DNA, 120 bp, Artificial sequence
  Synthetic sequence
caattgggctaccttttttttgttttgtttgccatggttaatctattgttaaaatttaaagtttcacttgaactttcaaataatgttcttatatttgcagtgtcgaaagaaacaaagtag

SEQ ID NO: 175 - DNA, 120 bp, Artificial sequence
  Synthetic sequence
caattgggctaccttttttttgttttgtttgcgatggttaatctattgttaaaatttaaagtttcacttgaactttcaaataatgttcttatatttgcagtgtcgaaagaaacaaagtag

SEQ ID NO: 176 - DNA, 120 bp, Artificial sequence
  Synthetic sequence
caattgggctaccttttttttgttttgtttgctatggttaatctattgttaaaatttaaagtttcacttgaactttcaaataatgttcttatatttgcagtgtcgaaagaaacaaagtag

SEQ ID NO: 177 - DNA, 120 bp, Artificial sequence
  Synthetic sequence
caattgggctaccttttttttgttttgtttgcactggttaatctattgttaaaatttaaagtttcacttgaactttcaaataatgttcttatatttgcagtgtcgaaagaaacaaagtag

SEQ ID NO: 178 - DNA, 120 bp, Artificial sequence
  Synthetic sequence
caattgggctaccttttttttgttttgtttgcagtggttaatctattgttaaaatttaaagtttcacttgaactttcaaataatgttcttatatttgcagtgtcgaaagaaacaaagtag

SEQ ID NO: 179 - DNA, 120 bp, Artificial sequence
  Synthetic sequence
caattgggctaccttttttttgttttgtttgcattggttaatctattgttaaaatttaaagtttcacttgaactttcaaataatgttcttatatttgcagtgtcgaaagaaacaaagtag

SEQ ID NO: 180 - DNA, 120 bp, Artificial sequence
  Synthetic sequence
caattgggctaccttttttttgttttgtttgcaaaggttaatctattgttaaaatttaaagtttcacttgaactttcaaataatgttcttatatttgcagtgtcgaaagaaacaaagtag

SEQ ID NO: 181 - DNA, 120 bp, Artificial sequence
  Synthetic sequence
caattgggctaccttttttttgttttgtttgcaacggttaatctattgttaaaatttaaagtttcacttgaactttcaaataatgttcttatatttgcagtgtcgaaagaaacaaagtag

SEQ ID NO: 182 - DNA, 120 bp, Artificial sequence
  Synthetic sequence
caattgggctaccttttttttgttttgtttgcaagggttaatctattgttaaaatttaaagtttcacttgaactttcaaataatgttcttatatttgcagtgtcgaaagaaacaaagtag

SEQ ID NO: 183 - DNA, 120 bp, Artificial sequence
  Synthetic sequence
caattgggctaccttttttttgttttgtttgcaatagttaatctattgttaaaatttaaagtttcacttgaactttcaaataatgttcttatatttgcagtgtcgaaagaaacaaagtag

SEQ ID NO: 184 - DNA, 120 bp, Artificial sequence
  Synthetic sequence
caattgggctaccttttttttgttttgtttgcaatcgttaatctattgttaaaatttaaagtttcacttgaactttcaaataatgttcttatatttgcagtgtcgaaagaaacaaagtag

SEQ ID NO: 185 - DNA, 120 bp, Artificial sequence
  Synthetic sequence
caattgggctaccttttttttgttttgtttgcaattgttaatctattgttaaaatttaaagtttcacttgaactttcaaataatgttcttatatttgcagtgtcgaaagaaacaaagtag

SEQ ID NO: 186 - DNA, 120 bp, Artificial sequence
  Synthetic sequence
caattgggctaccttttttttgttttgtttgcaatgattaatctattgttaaaatttaaagtttcacttgaactttcaaataatgttcttatatttgcagtgtcgaaagaaacaaagtag

SEQ ID NO: 187 - DNA, 120 bp, Artificial sequence
  Synthetic sequence
caattgggctaccttttttttgttttgtttgcaatgtttaatctattgttaaaatttaaagtttcacttgaactttcaaataatgttcttatatttgcagtgtcgaaagaaacaaagtag

SEQ ID NO: 188 - DNA, 120 bp, Artificial sequence
  Synthetic sequence
caattgggctaccttttttttgttttgtttgcaatggctaatctattgttaaaatttaaagtttcacttgaactttcaaataatgttcttatatttgcagtgtcgaaagaaacaaagtag

SEQ ID NO: 189 - DNA, 120 bp, Artificial sequence
  Synthetic sequence
caattgggctaccttttttttgttttgtttgcaatgggtaatctattgttaaaatttaaagtttcacttgaactttcaaataatgttcttatatttgcagtgtcgaaagaaacaaagtag

SEQ ID NO: 190 - DNA, 120 bp, Artificial sequence
  Synthetic sequence
caattgggctaccttttttttgttttgtttgcaatggtaaatctattgttaaaatttaaagtttcacttgaactttcaaataatgttcttatatttgcagtgtcgaaagaaacaaagtag

SEQ ID NO: 191 - DNA, 120 bp, Artificial sequence
  Synthetic sequence
caattgggctaccttttttttgttttgtttgcaatggtgaatctattgttaaaatttaaagtttcacttgaactttcaaataatgttcttatatttgcagtgtcgaaagaaacaaagtag

SEQ ID NO: 192 - DNA, 120 bp, Artificial sequence
  Synthetic sequence
caattgggctaccttttttttgttttgtttgcaatggttcatctattgttaaaatttaaagtttcacttgaactttcaaataatgttcttatatttgcagtgtcgaaagaaacaaagtag

SEQ ID NO: 193 - DNA, 120 bp, Artificial sequence
  Synthetic sequence
caattgggctaccttttttttgttttgtttgcaatggttgatctattgttaaaatttaaagtttcacttgaactttcaaataatgttcttatatttgcagtgtcgaaagaaacaaagtag

SEQ ID NO: 194 - DNA, 120 bp, Artificial sequence
  Synthetic sequence
caattgggctaccttttttttgttttgtttgcaatggtttatctattgttaaaatttaaagtttcacttgaactttcaaataatgttcttatatttgcagtgtcgaaagaaacaaagtag

SEQ ID NO: 195 - DNA, 120 bp, Artificial sequence
  Synthetic sequence
caattgggctaccttttttttgttttgtttgcaatggttactctattgttaaaatttaaagtttcacttgaactttcaaataatgttcttatatttgcagtgtcgaaagaaacaaagtag

SEQ ID NO: 196 - DNA, 120 bp, Artificial sequence
  Synthetic sequence
caattgggctaccttttttttgttttgtttgcaatggttagtctattgttaaaatttaaagtttcacttgaactttcaaataatgttcttatatttgcagtgtcgaaagaaacaaagtag

SEQ ID NO: 197 - DNA, 120 bp, Artificial sequence
  Synthetic sequence
caattgggctaccttttttttgttttgtttgcaatggttattctattgttaaaatttaaagtttcacttgaactttcaaataatgttcttatatttgcagtgtcgaaagaaacaaagtag

SEQ ID NO: 198 - DNA, 120 bp, Artificial sequence
  Synthetic sequence
caattgggctaccttttttttgttttgtttgcaatggttaaactattgttaaaatttaaagtttcacttgaactttcaaataatgttcttatatttgcagtgtcgaaagaaacaaagtag

SEQ ID NO: 199 - DNA, 120 bp, Artificial sequence
  Synthetic sequence
caattgggctaccttttttttgttttgtttgcaatggttaacctattgttaaaatttaaagtttcacttgaactttcaaataatgttcttatatttgcagtgtcgaaagaaacaaagtag

SEQ ID NO: 200 - DNA, 120 bp, Artificial sequence
  Synthetic sequence
caattgggctaccttttttttgttttgtttgcaatggttaagctattgttaaaatttaaagtttcacttgaactttcaaataatgttcttatatttgcagtgtcgaaagaaacaaagtag

SEQ ID NO: 201 - DNA, 120 bp, Artificial sequence
  Synthetic sequence
caattgggctaccttttttttgttttgtttgcaatggttaatatattgttaaaatttaaagtttcacttgaactttcaaataatgttcttatatttgcagtgtcgaaagaaacaaagtag

SEQ ID NO: 202 - DNA, 120 bp, Artificial sequence
  Synthetic sequence
caattgggctaccttttttttgttttgtttgcaatggttaatgtattgttaaaatttaaagtttcacttgaactttcaaataatgttcttatatttgcagtgtcgaaagaaacaaagtag

SEQ ID NO: 203 - DNA, 120 bp, Artificial sequence
  Synthetic sequence
caattgggctaccttttttttgttttgtttgcaatggttaatttattgttaaaatttaaagtttcacttgaactttcaaataatgttcttatatttgcagtgtcgaaagaaacaaagtag

SEQ ID NO: 204 - DNA, 120 bp, Artificial sequence
  Synthetic sequence
caattgggctaccttttttttgttttgtttgcaatggttaatcaattgttaaaatttaaagtttcacttgaactttcaaataatgttcttatatttgcagtgtcgaaagaaacaaagtag

SEQ ID NO: 205 - DNA, 120 bp, Artificial sequence
  Synthetic sequence
caattgggctaccttttttttgttttgtttgcaatggttaatccattgttaaaatttaaagtttcacttgaactttcaaataatgttcttatatttgcagtgtcgaaagaaacaaagtag

SEQ ID NO: 206 - DNA, 120 bp, Artificial sequence
  Synthetic sequence
caattgggctaccttttttttgttttgtttgcaatggttaatcgattgttaaaatttaaagtttcacttgaactttcaaataatgttcttatatttgcagtgtcgaaagaaacaaagtag

SEQ ID NO: 207 - DNA, 120 bp, Artificial sequence
  Synthetic sequence
caattgggctaccttttttttgttttgtttgcaatggttaatctcttgttaaaatttaaagtttcacttgaactttcaaataatgttcttatatttgcagtgtcgaaagaaacaaagtag

SEQ ID NO: 208 - DNA, 120 bp, Artificial sequence
  Synthetic sequence
caattgggctaccttttttttgttttgtttgcaatggttaatctgttgttaaaatttaaagtttcacttgaactttcaaataatgttcttatatttgcagtgtcgaaagaaacaaagtag

SEQ ID NO: 209 - DNA, 120 bp, Artificial sequence
  Synthetic sequence
caattgggctaccttttttttgttttgtttgcaatggttaatcttttgttaaaatttaaagtttcacttgaactttcaaataatgttcttatatttgcagtgtcgaaagaaacaaagtag

SEQ ID NO: 210 - DNA, 120 bp, Artificial sequence
  Synthetic sequence
caattgggctaccttttttttgttttgtttgcaatggttaatctaatgttaaaatttaaagtttcacttgaactttcaaataatgttcttatatttgcagtgtcgaaagaaacaaagtag

SEQ ID NO: 211 - DNA, 120 bp, Artificial sequence
  Synthetic sequence
caattgggctaccttttttttgttttgtttgcaatggttaatctactgttaaaatttaaagtttcacttgaactttcaaataatgttcttatatttgcagtgtcgaaagaaacaaagtag

SEQ ID NO: 212 - DNA, 120 bp, Artificial sequence
  Synthetic sequence
caattgggctaccttttttttgttttgtttgcaatggttaatctagtgttaaaatttaaagtttcacttgaactttcaaataatgttcttatatttgcagtgtcgaaagaaacaaagtag

SEQ ID NO: 213 - DNA, 120 bp, Artificial sequence
  Synthetic sequence
caattgggctaccttttttttgttttgtttgcaatggttaatctatagttaaaatttaaagtttcacttgaactttcaaataatgttcttatatttgcagtgtcgaaagaaacaaagtag

SEQ ID NO: 214 - DNA, 120 bp, Artificial sequence
  Synthetic sequence
caattgggctaccttttttttgttttgtttgcaatggttaatctatcgttaaaatttaaagtttcacttgaactttcaaataatgttcttatatttgcagtgtcgaaagaaacaaagtag

SEQ ID NO: 215 - DNA, 120 bp, Artificial sequence
  Synthetic sequence
caattgggctaccttttttttgttttgtttgcaatggttaatctatggttaaaatttaaagtttcacttgaactttcaaataatgttcttatatttgcagtgtcgaaagaaacaaagtag

SEQ ID NO: 216 - DNA, 120 bp, Artificial sequence
  Synthetic sequence
caattgggctaccttttttttgttttgtttgcaatggttaatctattattaaaatttaaagtttcacttgaactttcaaataatgttcttatatttgcagtgtcgaaagaaacaaagtag

SEQ ID NO: 217 - DNA, 120 bp, Artificial sequence
  Synthetic sequence
caattgggctaccttttttttgttttgtttgcaatggttaatctattcttaaaatttaaagtttcacttgaactttcaaataatgttcttatatttgcagtgtcgaaagaaacaaagtag

SEQ ID NO: 218 - DNA, 120 bp, Artificial sequence
  Synthetic sequence
caattgggctaccttttttttgttttgtttgcaatggttaatctatttttaaaatttaaagtttcacttgaactttcaaataatgttcttatatttgcagtgtcgaaagaaacaaagtag

SEQ ID NO: 219 - DNA, 120 bp, Artificial sequence
  Synthetic sequence
caattgggctaccttttttttgttttgtttgcaatggttaatctattgataaaatttaaagtttcacttgaactttcaaataatgttcttatatttgcagtgtcgaaagaaacaaagtag

SEQ ID NO: 220 - DNA, 120 bp, Artificial sequence
  Synthetic sequence
caattgggctaccttttttttgttttgtttgcaatggttaatctattgctaaaatttaaagtttcacttgaactttcaaataatgttcttatatttgcagtgtcgaaagaaacaaagtag

SEQ ID NO: 221 - DNA, 120 bp, Artificial sequence
  Synthetic sequence
caattgggctaccttttttttgttttgtttgcaatggttaatctattgtaaaaatttaaagtttcacttgaactttcaaataatgttcttatatttgcagtgtcgaaagaaacaaagtag

SEQ ID NO: 222 - DNA, 120 bp, Artificial sequence
  Synthetic sequence
caattgggctaccttttttttgttttgtttgcaatggttaatctattgtcaaaatttaaagtttcacttgaactttcaaataatgttcttatatttgcagtgtcgaaagaaacaaagtag

SEQ ID NO: 223 - DNA, 120 bp, Artificial sequence
  Synthetic sequence
caattgggctaccttttttttgttttgtttgcaatggttaatctattgtgaaaatttaaagtttcacttgaactttcaaataatgttcttatatttgcagtgtcgaaagaaacaaagtag

SEQ ID NO: 224 - DNA, 120 bp, Artificial sequence; identical to SEQ ID NO: 7
  Synthetic sequence

SEQ ID NO: 225 - DNA, 120 bp, Artificial sequence
  Synthetic sequence
caattgggctaccttttttttgttttgtttgcaatggttaatctattgtttaaatttaaagtttcacttgaactttcaaataatgttcttatatttgcagtgtcgaaagaaacaaagtag

SEQ ID NO: 226 - DNA, 120 bp, Artificial sequence
  Synthetic sequence
caattgggctaccttttttttgttttgtttgcaatggttaatctattgttacaatttaaagtttcacttgaactttcaaataatgttcttatatttgcagtgtcgaaagaaacaaagtag

SEQ ID NO: 227 - DNA, 120 bp, Artificial sequence
  Synthetic sequence
caattgggctaccttttttttgttttgtttgcaatggttaatctattgttagaatttaaagtttcacttgaactttcaaataatgttcttatatttgcagtgtcgaaagaaacaaagtag

SEQ ID NO: 228 - DNA, 120 bp, Artificial sequence
  Synthetic sequence
caattgggctaccttttttttgttttgtttgcaatggttaatctattgttataatttaaagtttcacttgaactttcaaataatgttcttatatttgcagtgtcgaaagaaacaaagtag

SEQ ID NO: 229 - DNA, 120 bp, Artificial sequence
  Synthetic sequence
caattgggctaccttttttttgttttgtttgcaatggttaatctattgttaacatttaaagtttcacttgaactttcaaataatgttcttatatttgcagtgtcgaaagaaacaaagtag

SEQ ID NO: 230 - DNA, 120 bp, Artificial sequence
  Synthetic sequence
caattgggctaccttttttttgttttgtttgcaatggttaatctattgttaagatttaaagtttcacttgaactttcaaataatgttcttatatttgcagtgtcgaaagaaacaaagtag

SEQ ID NO: 231 - DNA, 120 bp, Artificial sequence
  Synthetic sequence
caattgggctaccttttttttgttttgtttgcaatggttaatctattgttaatatttaaagtttcacttgaactttcaaataatgttcttatatttgcagtgtcgaaagaaacaaagtag

SEQ ID NO: 232 - DNA, 120 bp, Artificial sequence
  Synthetic sequence
caattgggctaccttttttttgttttgtttgcaatggttaatctattgttaaactttaaagtttcacttgaactttcaaataatgttcttatatttgcagtgtcgaaagaaacaaagtag

SEQ ID NO: 233 - DNA, 120 bp, Artificial sequence
  Synthetic sequence
caattgggctaccttttttttgttttgtttgcaatggttaatctattgttaaagtttaaagtttcacttgaactttcaaataatgttcttatatttgcagtgtcgaaagaaacaaagtag

SEQ ID NO: 234 - DNA, 120 bp, Artificial sequence
  Synthetic sequence
caattgggctaccttttttttgttttgtttgcaatggttaatctattgttaaattttaaagtttcacttgaactttcaaataatgttcttatatttgcagtgtcgaaagaaacaaagtag

SEQ ID NO: 235 - DNA, 120 bp, Artificial sequence
  Synthetic sequence
caattgggctaccttttttttgttttgtttgcaatggttaatctattgttaaaaattaaagtttcacttgaactttcaaataatgttcttatatttgcagtgtcgaaagaaacaaagtag

SEQ ID NO: 236 - DNA, 120 bp, Artificial sequence
  Synthetic sequence
caattgggctaccttttttttgttttgtttgcaatggttaatctattgttaaaacttaaagtttcacttgaactttcaaataatgttcttatatttgcagtgtcgaaagaaacaaagtag

SEQ ID NO: 237 - DNA, 120 bp, Artificial sequence
  Synthetic sequence
caattgggctaccttttttttgttttgtttgcaatggttaatctattgttaaaagttaaagtttcacttgaactttcaaataatgttcttatatttgcagtgtcgaaagaaacaaagtag

SEQ ID NO: 238 - DNA, 120 bp, Artificial sequence
  Synthetic sequence
caattgggctaccttttttttgttttgtttgcaatggttaatctattgttaaaatataaagtttcacttgaactttcaaataatgttcttatatttgcagtgtcgaaagaaacaaagtag

SEQ ID NO: 239 - DNA, 120 bp, Artificial sequence
  Synthetic sequence
caattgggctaccttttttttgttttgtttgcaatggttaatctattgttaaaatctaaagtttcacttgaactttcaaataatgttcttatatttgcagtgtcgaaagaaacaaagtag

SEQ ID NO: 240 - DNA, 120 bp, Artificial sequence
  Synthetic sequence
caattgggctaccttttttttgttttgtttgcaatggttaatctattgttaaaatgtaaagtttcacttgaactttcaaataatgttcttatatttgcagtgtcgaaagaaacaaagtag

SEQ ID NO: 241 - DNA, 120 bp, Artificial sequence
  Synthetic sequence
caattgggctaccttttttttgttttgtttgcaatggttaatctattgttaaaattaaaagtttcacttgaactttcaaataatgttcttatatttgcagtgtcgaaagaaacaaagtag

SEQ ID NO: 242 - DNA, 120 bp, Artificial sequence
  Synthetic sequence
caattgggctaccttttttttgttttgtttgcaatggttaatctattgttaaaattgaaagtttcacttgaactttcaaataatgttcttatatttgcagtgtcgaaagaaacaaagtag

SEQ ID NO: 243 - DNA, 120 bp, Artificial sequence
  Synthetic sequence
caattgggctaccttttttttgttttgtttgcaatggttaatctattgttaaaatttcaagtttcacttgaactttcaaataatgttcttatatttgcagtgtcgaaagaaacaaagtag

SEQ ID NO: 244 - DNA, 120 bp, Artificial sequence
  Synthetic sequence
caattgggctaccttttttttgttttgtttgcaatggttaatctattgttaaaatttgaagtttcacttgaactttcaaataatgttcttatatttgcagtgtcgaaagaaacaaagtag

SEQ ID NO: 245 - DNA, 120 bp, Artificial sequence
  Synthetic sequence
caattgggctaccttttttttgttttgtttgcaatggttaatctattgttaaaattttaagtttcacttgaactttcaaataatgttcttatatttgcagtgtcgaaagaaacaaagtag

SEQ ID NO: 246 - DNA, 120 bp, Artificial sequence
  Synthetic sequence
caattgggctaccttttttttgttttgtttgcaatggttaatctattgttaaaatttagagtttcacttgaactttcaaataatgttcttatatttgcagtgtcgaaagaaacaaagtag

SEQ ID NO: 247 - DNA, 120 bp, Artificial sequence
  Synthetic sequence
caattgggctaccttttttttgttttgtttgcaatggttaatctattgttaaaatttatagtttcacttgaactttcaaataatgttcttatatttgcagtgtcgaaagaaacaaagtag

SEQ ID NO: 248 - DNA, 120 bp, Artificial sequence
  Synthetic sequence
caattgggctaccttttttttgttttgtttgcaatggttaatctattgttaaaatttaacgtttcacttgaactttcaaataatgttcttatatttgcagtgtcgaaagaaacaaagtag

SEQ ID NO: 249 - DNA, 120 bp, Artificial sequence
  Synthetic sequence
caattgggctaccttttttttgttttgtttgcaatggttaatctattgttaaaatttaaggtttcacttgaactttcaaataatgttcttatatttgcagtgtcgaaagaaacaaagtag

SEQ ID NO: 250 - DNA, 120 bp, Artificial sequence
  Synthetic sequence
caattgggctaccttttttttgttttgtttgcaatggttaatctattgttaaaatttaatgtttcacttgaactttcaaataatgttcttatatttgcagtgtcgaaagaaacaaagtag

SEQ ID NO: 251 - DNA, 120 bp, Artificial sequence
  Synthetic sequence
caattgggctaccttttttttgttttgtttgcaatggttaatctattgttaaaatttaaaatttcacttgaactttcaaataatgttcttatatttgcagtgtcgaaagaaacaaagtag

SEQ ID NO: 252 - DNA, 120 bp, Artificial sequence
  Synthetic sequence
caattgggctaccttttttttgttttgtttgcaatggttaatctattgttaaaatttaaactttcacttgaactttcaaataatgttcttatatttgcagtgtcgaaagaaacaaagtag

SEQ ID NO: 253 - DNA, 120 bp, Artificial sequence
  Synthetic sequence
caattgggctaccttttttttgttttgtttgcaatggttaatctattgttaaaatttaaattttcacttgaactttcaaataatgttcttatatttgcagtgtcgaaagaaacaaagtag

SEQ ID NO: 254 - DNA, 120 bp, Artificial sequence
  Synthetic sequence
caattgggctaccttttttttgttttgtttgcaatggttaatctattgttaaaatttaaagattcacttgaactttcaaataatgttcttatatttgcagtgtcgaaagaaacaaagtag

SEQ ID NO: 255 - DNA, 120 bp, Artificial sequence
  Synthetic sequence
caattgggctaccttttttttgttttgtttgcaatggttaatctattgttaaaatttaaagcttcacttgaactttcaaataatgttcttatatttgcagtgtcgaaagaaacaaagtag

SEQ ID NO: 256 - DNA, 120 bp, Artificial sequence
  Synthetic sequence
caattgggctaccttttttttgttttgtttgcaatggttaatctattgttaaaatttaaaggttcacttgaactttcaaataatgttcttatatttgcagtgtcgaaagaaacaaagtag

SEQ ID NO: 257 - DNA, 120 bp, Artificial sequence
  Synthetic sequence
caattgggctaccttttttttgttttgtttgcaatggttaatctattgttaaaatttaaagtatcacttgaactttcaaataatgttcttatatttgcagtgtcgaaagaaacaaagtag

SEQ ID NO: 258 - DNA, 120 bp, Artificial sequence
  Synthetic sequence
caattgggctaccttttttttgttttgtttgcaatggttaatctattgttaaaatttaaagtctcacttgaactttcaaataatgttcttatatttgcagtgtcgaaagaaacaaagtag

SEQ ID NO: 259 - DNA, 120 bp, Artificial sequence
  Synthetic sequence
caattgggctaccttttttttgttttgtttgcaatggttaatctattgttaaaatttaaagtgtcacttgaactttcaaataatgttcttatatttgcagtgtcgaaagaaacaaagtag

SEQ ID NO: 260 - DNA, 120 bp, Artificial sequence
  Synthetic sequence
caattgggctaccttttttttgttttgtttgcaatggttaatctattgttaaaatttaaagttacacttgaactttcaaataatgttcttatatttgcagtgtcgaaagaaacaaagtag

SEQ ID NO: 261 - DNA, 120 bp, Artificial sequence
  Synthetic sequence
caattgggctaccttttttttgttttgtttgcaatggttaatctattgttaaaatttaaagttgcacttgaactttcaaataatgttcttatatttgcagtgtcgaaagaaacaaagtag

SEQ ID NO: 262 - DNA, 120 bp, Artificial sequence
  Synthetic sequence
caattgggctaccttttttttgttttgtttgcaatggttaatctattgttaaaatttaaagtttaacttgaactttcaaataatgttcttatatttgcagtgtcgaaagaaacaaagtag

SEQ ID NO: 263 - DNA, 120 bp, Artificial sequence
  Synthetic sequence
caattgggctaccttttttttgttttgtttgcaatggttaatctattgttaaaatttaaagtttgacttgaactttcaaataatgttcttatatttgcagtgtcgaaagaaacaaagtag

SEQ ID NO: 264 - DNA, 120 bp, Artificial sequence
  Synthetic sequence
caattgggctaccttttttttgttttgtttgcaatggttaatctattgttaaaatttaaagttttacttgaactttcaaataatgttcttatatttgcagtgtcgaaagaaacaaagtag

SEQ ID NO: 265 - DNA, 120 bp, Artificial sequence
  Synthetic sequence
caattgggctaccttttttttgttttgtttgcaatggttaatctattgttaaaatttaaagtttcgcttgaactttcaaataatgttcttatatttgcagtgtcgaaagaaacaaagtag

SEQ ID NO: 266 - DNA, 120 bp, Artificial sequence
  Synthetic sequence
caattgggctaccttttttttgttttgtttgcaatggttaatctattgttaaaatttaaagtttctcttgaactttcaaataatgttcttatatttgcagtgtcgaaagaaacaaagtag

SEQ ID NO: 267 - DNA, 120 bp, Artificial sequence
  Synthetic sequence
caattgggctaccttttttttgttttgtttgcaatggttaatctattgttaaaatttaaagtttcaattgaactttcaaataatgttcttatatttgcagtgtcgaaagaaacaaagtag

SEQ ID NO: 268 - DNA, 120 bp, Artificial sequence
  Synthetic sequence
caattgggctaccttttttttgttttgtttgcaatggttaatctattgttaaaatttaaagtttcagttgaactttcaaataatgttcttatatttgcagtgtcgaaagaaacaaagtag

SEQ ID NO: 269 - DNA, 120 bp, Artificial sequence
  Synthetic sequence
caattgggctaccttttttttgttttgtttgcaatggttaatctattgttaaaatttaaagtttcatttgaactttcaaataatgttcttatatttgcagtgtcgaaagaaacaaagtag

SEQ ID NO: 270 - DNA, 120 bp, Artificial sequence
  Synthetic sequence
caattgggctaccttttttttgttttgtttgcaatggttaatctattgttaaaatttaaagtttcacatgaactttcaaataatgttcttatatttgcagtgtcgaaagaaacaaagtag

SEQ ID NO: 271 - DNA, 120 bp, Artificial sequence
  Synthetic sequence
caattgggctaccttttttttgttttgtttgcaatggttaatctattgttaaaatttaaagtttcacctgaactttcaaataatgttcttatatttgcagtgtcgaaagaaacaaagtag

SEQ ID NO: 272 - DNA, 120 bp, Artificial sequence
  Synthetic sequence
caattgggctaccttttttttgttttgtttgcaatggttaatctattgttaaaatttaaagtttcacgtgaactttcaaataatgttcttatatttgcagtgtcgaaagaaacaaagtag

SEQ ID NO: 273 - DNA, 120 bp, Artificial sequence
  Synthetic sequence
caattgggctaccttttttttgttttgtttgcaatggttaatctattgttaaaatttaaagtttcactagaactttcaaataatgttcttatatttgcagtgtcgaaagaaacaaagtag

SEQ ID NO: 274 - DNA, 120 bp, Artificial sequence
  Synthetic sequence
caattgggctaccttttttttgttttgtttgcaatggttaatctattgttaaaatttaaagtttcactcgaactttcaaataatgttcttatatttgcagtgtcgaaagaaacaaagtag

SEQ ID NO: 275 - DNA, 120 bp, Artificial sequence
  Synthetic sequence
caattgggctaccttttttttgttttgtttgcaatggttaatctattgttaaaatttaaagtttcactggaactttcaaataatgttcttatatttgcagtgtcgaaagaaacaaagtag

SEQ ID NO: 276 - DNA, 120 bp, Artificial sequence
  Synthetic sequence
caattgggctaccttttttttgttttgtttgcaatggttaatctattgttaaaatttaaagtttcacttaaactttcaaataatgttcttatatttgcagtgtcgaaagaaacaaagtag

SEQ ID NO: 277 - DNA, 120 bp, Artificial sequence
  Synthetic sequence
caattgggctaccttttttttgttttgtttgcaatggttaatctattgttaaaatttaaagtttcacttcaactttcaaataatgttcttatatttgcagtgtcgaaagaaacaaagtag

SEQ ID NO: 278 - DNA, 120 bp, Artificial sequence
  Synthetic sequence
caattgggctaccttttttttgttttgtttgcaatggttaatctattgttaaaatttaaagtttcactttaactttcaaataatgttcttatatttgcagtgtcgaaagaaacaaagtag

SEQ ID NO: 279 - DNA, 120 bp, Artificial sequence
  Synthetic sequence
caattgggctaccttttttttgttttgtttgcaatggttaatctattgttaaaatttaaagtttcacttgcactttcaaataatgttcttatatttgcagtgtcgaaagaaacaaagtag

SEQ ID NO: 280 - DNA, 120 bp, Artificial sequence
  Synthetic sequence
caattgggctaccttttttttgttttgtttgcaatggttaatctattgttaaaatttaaagtttcacttggactttcaaataatgttcttatatttgcagtgtcgaaagaaacaaagtag

SEQ ID NO: 281 - DNA, 120 bp, Artificial sequence
  Synthetic sequence
caattgggctaccttttttttgttttgtttgcaatggttaatctattgttaaaatttaaagtttcacttgtactttcaaataatgttcttatatttgcagtgtcgaaagaaacaaagtag

SEQ ID NO: 282 - DNA, 120 bp, Artificial sequence
  Synthetic sequence
caattgggctaccttttttttgttttgtttgcaatggttaatctattgttaaaatttaaagtttcacttgacctttcaaataatgttcttatatttgcagtgtcgaaagaaacaaagtag

SEQ ID NO: 283 - DNA, 120 bp, Artificial sequence
  Synthetic sequence
caattgggctaccttttttttgttttgtttgcaatggttaatctattgttaaaatttaaagtttcacttgagctttcaaataatgttcttatatttgcagtgtcgaaagaaacaaagtag

SEQ ID NO: 284 - DNA, 120 bp, Artificial sequence
  Synthetic sequence
caattgggctaccttttttttgttttgtttgcaatggttaatctattgttaaaatttaaagtttcacttgatctttcaaataatgttcttatatttgcagtgtcgaaagaaacaaagtag

SEQ ID NO: 285 - DNA, 120 bp, Artificial sequence
  Synthetic sequence
caattgggctaccttttttttgttttgtttgcaatggttaatctattgttaaaatttaaagtttcacttgaaatttcaaataatgttcttatatttgcagtgtcgaaagaaacaaagtag

SEQ ID NO: 286 - DNA, 120 bp, Artificial sequence
  Synthetic sequence
caattgggctaccttttttttgttttgtttgcaatggttaatctattgttaaaatttaaagtttcacttgaagtttcaaataatgttcttatatttgcagtgtcgaaagaaacaaagtag

SEQ ID NO: 287 - DNA, 120 bp, Artificial sequence
  Synthetic sequence
caattgggctaccttttttttgttttgtttgcaatggttaatctattgttaaaatttaaagtttcacttgaattttcaaataatgttcttatatttgcagtgtcgaaagaaacaaagtag

SEQ ID NO: 288 - DNA, 120 bp, Artificial sequence
  Synthetic sequence
caattgggctaccttttttttgttttgtttgcaatggttaatctattgttaaaatttaaagtttcacttgaacattcaaataatgttcttatatttgcagtgtcgaaagaaacaaagtag

SEQ ID NO: 289 - DNA, 120 bp, Artificial sequence
  Synthetic sequence
caattgggctaccttttttttgttttgtttgcaatggttaatctattgttaaaatttaaagtttcacttgaaccttcaaataatgttcttatatttgcagtgtcgaaagaaacaaagtag

SEQ ID NO: 290 - DNA, 120 bp, Artificial sequence
  Synthetic sequence
caattgggctaccttttttttgttttgtttgcaatggttaatctattgttaaaatttaaagtttcacttgaacgttcaaataatgttcttatatttgcagtgtcgaaagaaacaaagtag

SEQ ID NO: 291 - DNA, 120 bp, Artificial sequence
  Synthetic sequence
caattgggctaccttttttttgttttgtttgcaatggttaatctattgttaaaatttaaagtttcacttgaactatcaaataatgttcttatatttgcagtgtcgaaagaaacaaagtag

SEQ ID NO: 292 - DNA, 120 bp, Artificial sequence
  Synthetic sequence
caattgggctaccttttttttgttttgtttgcaatggttaatctattgttaaaatttaaagtttcacttgaactctcaaataatgttcttatatttgcagtgtcgaaagaaacaaagtag

SEQ ID NO: 293 - DNA, 120 bp, Artificial sequence
  Synthetic sequence
caattgggctaccttttttttgttttgtttgcaatggttaatctattgttaaaatttaaagtttcacttgaactgtcaaataatgttcttatatttgcagtgtcgaaagaaacaaagtag

SEQ ID NO: 294 - DNA, 120 bp, Artificial sequence
  Synthetic sequence
caattgggctaccttttttttgttttgtttgcaatggttaatctattgttaaaatttaaagtttcacttgaacttacaaataatgttcttatatttgcagtgtcgaaagaaacaaagtag

SEQ ID NO: 295 - DNA, 120 bp, Artificial sequence
  Synthetic sequence
caattgggctaccttttttttgttttgtttgcaatggttaatctattgttaaaatttaaagtttcacttgaacttccaaataatgttcttatatttgcagtgtcgaaagaaacaaagtag

SEQ ID NO: 296 - DNA, 120 bp, Artificial sequence
  Synthetic sequence
caattgggctaccttttttttgttttgtttgcaatggttaatctattgttaaaatttaaagtttcacttgaacttgcaaataatgttcttatatttgcagtgtcgaaagaaacaaagtag

SEQ ID NO: 297 - DNA, 120 bp, Artificial sequence
  Synthetic sequence
caattgggctaccttttttttgttttgtttgcaatggttaatctattgttaaaatttaaagtttcacttgaactttaaaataatgttcttatatttgcagtgtcgaaagaaacaaagtag

SEQ ID NO: 298 - DNA, 120 bp, Artificial sequence
  Synthetic sequence
caattgggctaccttttttttgttttgtttgcaatggttaatctattgttaaaatttaaagtttcacttgaactttgaaataatgttcttatatttgcagtgtcgaaagaaacaaagtag

SEQ ID NO: 299 - DNA, 120 bp, Artificial sequence
  Synthetic sequence
caattgggctaccttttttttgttttgtttgcaatggttaatctattgttaaaatttaaagtttcacttgaacttttaaataatgttcttatatttgcagtgtcgaaagaaacaaagtag

SEQ ID NO: 300 - DNA, 120 bp, Artificial sequence
  Synthetic sequence
caattgggctaccttttttttgttttgtttgcaatggttaatctattgttaaaatttaaagtttcacttgaactttccaataatgttcttatatttgcagtgtcgaaagaaacaaagtag

SEQ ID NO: 301 - DNA, 120 bp, Artificial sequence
  Synthetic sequence
caattgggctaccttttttttgttttgtttgcaatggttaatctattgttaaaatttaaagtttcacttgaactttcgaataatgttcttatatttgcagtgtcgaaagaaacaaagtag

SEQ ID NO: 302 - DNA, 120 bp, Artificial sequence
  Synthetic sequence
caattgggctaccttttttttgttttgtttgcaatggttaatctattgttaaaatttaaagtttcacttgaactttctaataatgttcttatatttgcagtgtcgaaagaaacaaagtag

SEQ ID NO: 303 - DNA, 120 bp, Artificial sequence
  Synthetic sequence
caattgggctaccttttttttgttttgtttgcaatggttaatctattgttaaaatttaaagtttcacttgaactttcacataatgttcttatatttgcagtgtcgaaagaaacaaagtag

SEQ ID NO: 304 - DNA, 120 bp, Artificial sequence
  Synthetic sequence
caattgggctaccttttttttgttttgtttgcaatggttaatctattgttaaaatttaaagtttcacttgaactttcagataatgttcttatatttgcagtgtcgaaagaaacaaagtag

SEQ ID NO: 305 - DNA, 120 bp, Artificial sequence
  Synthetic sequence
caattgggctaccttttttttgttttgtttgcaatggttaatctattgttaaaatttaaagtttcacttgaactttcatataatgttcttatatttgcagtgtcgaaagaaacaaagtag

SEQ ID NO: 306 - DNA, 120 bp, Artificial sequence
  Synthetic sequence
caattgggctaccttttttttgttttgtttgcaatggttaatctattgttaaaatttaaagtttcacttgaactttcaactaatgttcttatatttgcagtgtcgaaagaaacaaagtag

SEQ ID NO: 307 - DNA, 120 bp, Artificial sequence
  Synthetic sequence
caattgggctaccttttttttgttttgtttgcaatggttaatctattgttaaaatttaaagtttcacttgaactttcaagtaatgttcttatatttgcagtgtcgaaagaaacaaagtag

SEQ ID NO: 308 - DNA, 120 bp, Artificial sequence
  Synthetic sequence
caattgggctaccttttttttgttttgtttgcaatggttaatctattgttaaaatttaaagtttcacttgaactttcaattaatgttcttatatttgcagtgtcgaaagaaacaaagtag

SEQ ID NO: 309 - DNA, 120 bp, Artificial sequence
  Synthetic sequence
caattgggctaccttttttttgttttgtttgcaatggttaatctattgttaaaatttaaagtttcacttgaactttcaaaaaatgttcttatatttgcagtgtcgaaagaaacaaagtag

SEQ ID NO: 310 - DNA, 120 bp, Artificial sequence
  Synthetic sequence
caattgggctaccttttttttgttttgtttgcaatggttaatctattgttaaaatttaaagtttcacttgaactttcaaagaatgttcttatatttgcagtgtcgaaagaaacaaagtag

SEQ ID NO: 311 - DNA, 120 bp, Artificial sequence
  Synthetic sequence
caattgggctaccttttttttgttttgtttgcaatggttaatctattgttaaaatttaaagtttcacttgaactttcaaatcatgttcttatatttgcagtgtcgaaagaaacaaagtag

SEQ ID NO: 312 - DNA, 120 bp, Artificial sequence
  Synthetic sequence
caattgggctaccttttttttgttttgtttgcaatggttaatctattgttaaaatttaaagtttcacttgaactttcaaatgatgttcttatatttgcagtgtcgaaagaaacaaagtag

SEQ ID NO: 313 - DNA, 120 bp, Artificial sequence
  Synthetic sequence
caattgggctaccttttttttgttttgtttgcaatggttaatctattgttaaaatttaaagtttcacttgaactttcaaattatgttcttatatttgcagtgtcgaaagaaacaaagtag

SEQ ID NO: 314 - DNA, 120 bp, Artificial sequence
  Synthetic sequence
caattgggctaccttttttttgttttgtttgcaatggttaatctattgttaaaatttaaagtttcacttgaactttcaaatactgttcttatatttgcagtgtcgaaagaaacaaagtag

SEQ ID NO: 315 - DNA, 120 bp, Artificial sequence
  Synthetic sequence
caattgggctaccttttttttgttttgtttgcaatggttaatctattgttaaaatttaaagtttcacttgaactttcaaatagtgttcttatatttgcagtgtcgaaagaaacaaagtag

SEQ ID NO: 316 - DNA, 120 bp, Artificial sequence
  Synthetic sequence
caattgggctaccttttttttgttttgtttgcaatggttaatctattgttaaaatttaaagtttcacttgaactttcaaatattgttcttatatttgcagtgtcgaaagaaacaaagtag

SEQ ID NO: 317 - DNA, 120 bp, Artificial sequence
  Synthetic sequence
caattgggctaccttttttttgttttgtttgcaatggttaatctattgttaaaatttaaagtttcacttgaactttcaaataaagttcttatatttgcagtgtcgaaagaaacaaagtag

SEQ ID NO: 318 - DNA, 120 bp, Artificial sequence
  Synthetic sequence
caattgggctaccttttttttgttttgtttgcaatggttaatctattgttaaaatttaaagtttcacttgaactttcaaataacgttcttatatttgcagtgtcgaaagaaacaaagtag

SEQ ID NO: 319 - DNA, 120 bp, Artificial sequence
  Synthetic sequence
caattgggctaccttttttttgttttgtttgcaatggttaatctattgttaaaatttaaagtttcacttgaactttcaaataaggttcttatatttgcagtgtcgaaagaaacaaagtag

SEQ ID NO: 320 - DNA, 120 bp, Artificial sequence
  Synthetic sequence
caattgggctaccttttttttgttttgtttgcaatggttaatctattgttaaaatttaaagtttcacttgaactttcaaataatattcttatatttgcagtgtcgaaagaaacaaagtag

SEQ ID NO: 321 - DNA, 120 bp, Artificial sequence
  Synthetic sequence
caattgggctaccttttttttgttttgtttgcaatggttaatctattgttaaaatttaaagtttcacttgaactttcaaataatcttcttatatttgcagtgtcgaaagaaacaaagtag

SEQ ID NO: 322 - DNA, 120 bp, Artificial sequence
  Synthetic sequence
caattgggctaccttttttttgttttgtttgcaatggttaatctattgttaaaatttaaagtttcacttgaactttcaaataattttcttatatttgcagtgtcgaaagaaacaaagtag

SEQ ID NO: 323 - DNA, 120 bp, Artificial sequence
  Synthetic sequence
caattgggctaccttttttttgttttgtttgcaatggttaatctattgttaaaatttaaagtttcacttgaactttcaaataatgatcttatatttgcagtgtcgaaagaaacaaagtag

SEQ ID NO: 324 - DNA, 120 bp, Artificial sequence
  Synthetic sequence
caattgggctaccttttttttgttttgtttgcaatggttaatctattgttaaaatttaaagtttcacttgaactttcaaataatgctcttatatttgcagtgtcgaaagaaacaaagtag

SEQ ID NO: 325 - DNA, 120 bp, Artificial sequence
  Synthetic sequence
caattgggctaccttttttttgttttgtttgcaatggttaatctattgttaaaatttaaagtttcacttgaactttcaaataatggtcttatatttgcagtgtcgaaagaaacaaagtag

SEQ ID NO: 326 - DNA, 120 bp, Artificial sequence
  Synthetic sequence
caattgggctaccttttttttgttttgtttgcaatggttaatctattgttaaaatttaaagtttcacttgaactttcaaataatgtacttatatttgcagtgtcgaaagaaacaaagtag

SEQ ID NO: 327 - DNA, 120 bp, Artificial sequence
  Synthetic sequence
caattgggctaccttttttttgttttgtttgcaatggttaatctattgttaaaatttaaagtttcacttgaactttcaaataatgtccttatatttgcagtgtcgaaagaaacaaagtag

SEQ ID NO: 328 - DNA, 120 bp, Artificial sequence
  Synthetic sequence
caattgggctaccttttttttgttttgtttgcaatggttaatctattgttaaaatttaaagtttcacttgaactttcaaataatgtgcttatatttgcagtgtcgaaagaaacaaagtag

SEQ ID NO: 329 - DNA, 120 bp, Artificial sequence
  Synthetic sequence
caattgggctaccttttttttgttttgtttgcaatggttaatctattgttaaaatttaaagtttcacttgaactttcaaataatgttattatatttgcagtgtcgaaagaaacaaagtag

SEQ ID NO: 330 - DNA, 120 bp, Artificial sequence
  Synthetic sequence
caattgggctaccttttttttgttttgtttgcaatggttaatctattgttaaaatttaaagtttcacttgaactttcaaataatgttgttatatttgcagtgtcgaaagaaacaaagtag

SEQ ID NO: 331 - DNA, 120 bp, Artificial sequence
  Synthetic sequence
caattgggctaccttttttttgttttgtttgcaatggttaatctattgttaaaatttaaagtttcacttgaactttcaaataatgtttttatatttgcagtgtcgaaagaaacaaagtag

SEQ ID NO: 332 - DNA, 120 bp, Artificial sequence
  Synthetic sequence
caattgggctaccttttttttgttttgtttgcaatggttaatctattgttaaaatttaaagtttcacttgaactttcaaataatgttcatatatttgcagtgtcgaaagaaacaaagtag

SEQ ID NO: 333 - DNA, 120 bp, Artificial sequence
  Synthetic sequence
caattgggctaccttttttttgttttgtttgcaatggttaatctattgttaaaatttaaagtttcacttgaactttcaaataatgttcctatatttgcagtgtcgaaagaaacaaagtag

SEQ ID NO: 334 - DNA, 120 bp, Artificial sequence
  Synthetic sequence
caattgggctaccttttttttgttttgtttgcaatggttaatctattgttaaaatttaaagtttcacttgaactttcaaataatgttcgtatatttgcagtgtcgaaagaaacaaagtag

SEQ ID NO: 335 - DNA, 120 bp, Artificial sequence
  Synthetic sequence
caattgggctaccttttttttgttttgtttgcaatggttaatctattgttaaaatttaaagtttcacttgaactttcaaataatgttctaatatttgcagtgtcgaaagaaacaaagtag

SEQ ID NO: 336 - DNA, 120 bp, Artificial sequence
  Synthetic sequence
caattgggctaccttttttttgttttgtttgcaatggttaatctattgttaaaatttaaagtttcacttgaactttcaaataatgttctcatatttgcagtgtcgaaagaaacaaagtag

SEQ ID NO: 337 - DNA, 120 bp, Artificial sequence
  Synthetic sequence
caattgggctaccttttttttgttttgtttgcaatggttaatctattgttaaaatttaaagtttcacttgaactttcaaataatgttctgatatttgcagtgtcgaaagaaacaaagtag

SEQ ID NO: 338 - DNA, 120 bp, Artificial sequence; identical to SEQ ID NO: 5
  Synthetic sequence

SEQ ID NO: 339 - DNA, 120 bp, Artificial sequence
  Synthetic sequence
caattgggctaccttttttttgttttgtttgcaatggttaatctattgttaaaatttaaagtttcacttgaactttcaaataatgttcttgtatttgcagtgtcgaaagaaacaaagtag

SEQ ID NO: 340 - DNA, 120 bp, Artificial sequence
  Synthetic sequence
caattgggctaccttttttttgttttgtttgcaatggttaatctattgttaaaatttaaagtttcacttgaactttcaaataatgttcttttatttgcagtgtcgaaagaaacaaagtag

SEQ ID NO: 341 - DNA, 120 bp, Artificial sequence
  Synthetic sequence
caattgggctaccttttttttgttttgtttgcaatggttaatctattgttaaaatttaaagtttcacttgaactttcaaataatgttcttaaatttgcagtgtcgaaagaaacaaagtag

SEQ ID NO: 342 - DNA, 120 bp, Artificial sequence
  Synthetic sequence
caattgggctaccttttttttgttttgtttgcaatggttaatctattgttaaaatttaaagtttcacttgaactttcaaataatgttcttacatttgcagtgtcgaaagaaacaaagtag

SEQ ID NO: 343 - DNA, 120 bp, Artificial sequence
  Synthetic sequence
caattgggctaccttttttttgttttgtttgcaatggttaatctattgttaaaatttaaagtttcacttgaactttcaaataatgttcttagatttgcagtgtcgaaagaaacaaagtag

SEQ ID NO: 344 - DNA, 120 bp, Artificial sequence
  Synthetic sequence
caattgggctaccttttttttgttttgtttgcaatggttaatctattgttaaaatttaaagtttcacttgaactttcaaataatgttcttatctttgcagtgtcgaaagaaacaaagtag

SEQ ID NO: 345 - DNA, 120 bp, Artificial sequence
  Synthetic sequence
caattgggctaccttttttttgttttgtttgcaatggttaatctattgttaaaatttaaagtttcacttgaactttcaaataatgttcttatgtttgcagtgtcgaaagaaacaaagtag

SEQ ID NO: 346 - DNA, 120 bp, Artificial sequence
  Synthetic sequence
caattgggctaccttttttttgttttgtttgcaatggttaatctattgttaaaatttaaagtttcacttgaactttcaaataatgttcttatttttgcagtgtcgaaagaaacaaagtag

SEQ ID NO: 347 - DNA, 120 bp, Artificial sequence
  Synthetic sequence
caattgggctaccttttttttgttttgtttgcaatggttaatctattgttaaaatttaaagtttcacttgaactttcaaataatgttcttataattgcagtgtcgaaagaaacaaagtag

SEQ ID NO: 348 - DNA, 120 bp, Artificial sequence
  Synthetic sequence
caattgggctaccttttttttgttttgtttgcaatggttaatctattgttaaaatttaaagtttcacttgaactttcaaataatgttcttatacttgcagtgtcgaaagaaacaaagtag

SEQ ID NO: 349 - DNA, 120 bp, Artificial sequence
  Synthetic sequence
caattgggctaccttttttttgttttgtttgcaatggttaatctattgttaaaatttaaagtttcacttgaactttcaaataatgttcttatatatgcagtgtcgaaagaaacaaagtag

SEQ ID NO: 350 - DNA, 120 bp, Artificial sequence
  Synthetic sequence
caattgggctaccttttttttgttttgtttgcaatggttaatctattgttaaaatttaaagtttcacttgaactttcaaataatgttcttatatctgcagtgtcgaaagaaacaaagtag

SEQ ID NO: 351 - DNA, 120 bp, Artificial sequence; identical to SEQ ID NO: 3
  Synthetic sequence

SEQ ID NO: 352 - DNA, 120 bp, Artificial sequence
  Synthetic sequence
caattgggctaccttttttttgttttgtttgcaatggttaatctattgttaaaatttaaagtttcacttgaactttcaaataatgttcttatattagcagtgtcgaaagaaacaaagtag

SEQ ID NO: 353 - DNA, 120 bp, Artificial sequence
  Synthetic sequence
caattgggctaccttttttttgttttgtttgcaatggttaatctattgttaaaatttaaagtttcacttgaactttcaaataatgttcttatattggcagtgtcgaaagaaacaaagtag

SEQ ID NO: 354 - DNA, 120 bp, Artificial sequence
  Synthetic sequence
caattgggctaccttttttttgttttgtttgcaatggttaatctattgttaaaatttaaagtttcacttgaactttcaaataatgttcttatatttacagtgtcgaaagaaacaaagtag

SEQ ID NO: 355 - DNA, 120 bp, Artificial sequence; identical to SEQ ID NO: 6
  Synthetic sequence

SEQ ID NO: 356 - DNA, 120 bp, Artificial sequence
  Synthetic sequence
caattgggctaccttttttttgttttgtttgcaatggttaatctattgttaaaatttaaagtttcacttgaactttcaaataatgttcttatattttcagtgtcgaaagaaacaaagtag

SEQ ID NO: 357 - DNA, 120 bp, Artificial sequence
  Synthetic sequence
caattgggctaccttttttttgttttgtttgcaatggttaatctattgttaaaatttaaagtttcacttgaactttcaaataatgttcttatatttggagtgtcgaaagaaacaaagtag

SEQ ID NO: 358 - DNA, 120 bp, Artificial sequence
  Synthetic sequence
caattgggctaccttttttttgttttgtttgcaatggttaatctattgttaaaatttaaagtttcacttgaactttcaaataatgttcttatatttgtagtgtcgaaagaaacaaagtag

SEQ ID NO: 359 - DNA, 120 bp, Artificial sequence
  Synthetic sequence
caattgggctaccttttttttgttttgtttgcaatggttaatctattgttaaaatttaaagtttcacttgaactttcaaataatgttcttatatttgccgtgtcgaaagaaacaaagtag

SEQ ID NO: 360 - DNA, 120 bp, Artificial sequence
  Synthetic sequence
caattgggctaccttttttttgttttgtttgcaatggttaatctattgttaaaatttaaagtttcacttgaactttcaaataatgttcttatatttgcggtgtcgaaagaaacaaagtag

SEQ ID NO: 361 - DNA, 120 bp, Artificial sequence
  Synthetic sequence
caattgggctaccttttttttgttttgtttgcaatggttaatctattgttaaaatttaaagtttcacttgaactttcaaataatgttcttatatttgctgtgtcgaaagaaacaaagtag

SEQ ID NO: 362 - DNA, 120 bp, Artificial sequence
  Synthetic sequence
caattgggctaccttttttttgttttgtttgcaatggttaatctattgttaaaatttaaagtttcacttgaactttcaaataatgttcttatatttgcaatgtcgaaagaaacaaagtag

SEQ ID NO: 363 - DNA, 120 bp, Artificial sequence
  Synthetic sequence
caattgggctaccttttttttgttttgtttgcaatggttaatctattgttaaaatttaaagtttcacttgaactttcaaataatgttcttatatttgcactgtcgaaagaaacaaagtag

SEQ ID NO: 364 - DNA, 120 bp, Artificial sequence
  Synthetic sequence
caattgggctaccttttttttgttttgtttgcaatggttaatctattgttaaaatttaaagtttcacttgaactttcaaataatgttcttatatttgcattgtcgaaagaaacaaagtag

SEQ ID NO: 365 - DNA, 32 bp, Artificial sequence
  Synthetic sequence
  misc_feature (9)..(28): n is a, c, g, or t
gactgatcnnnnnnnnnnnnnnnnnnnncgta

SEQ ID NO: 366 - DNA, 32 bp, Artificial sequence
  Synthetic sequence
  misc_feature (9)..(28): n is a, c, g, or t
catttacgnnnnnnnnnnnnnnnnnnnngatc

SEQ ID NO: 367 - DNA, 32 bp, Artificial sequence
  Synthetic sequence
  misc_feature (9)..(19): n is a, c, g, or t
  misc_feature (27)..(28): n is a, c, g, or t
gactgatcnnnnnnnnnnnrrrrrrrnncgta

SEQ ID NO: 368 - DNA, 32 bp, Artificial sequence
  Synthetic sequence
  misc_feature (9)..(10): n is a, c, g, or t
  misc_feature (18)..(28): n is a, c, g, or t
catttacgnnyyyyyyynnnnnnnnnnngatc

SEQ ID NO: 369 - DNA, 32 bp, Artificial sequence
  Synthetic sequence
  misc_feature (9)..(17): n is a, c, g, or t
  misc_feature (29)..(29): n is a, c, g, or t
gactgatcnnnnnnnnnwwwaaawwtwanaat

SEQ ID NO: 370 - DNA, 32 bp, Artificial sequence
  Synthetic sequence
  misc_feature (8)..(8): n is a, c, g, or t
  misc_feature (20)..(28): n is a, c, g, or t
cattattntwawwtttwwwnnnnnnnnngatc

SEQ ID NO: 371 - DNA, 15 bp, Artificial sequence
  Synthetic sequence
  misc_feature (1)..(1): n is a, c, g, or t
  misc_feature (8)..(8): n is a, c, g, or t
nwawtwanaataatg

SEQ ID NO: 372 - DNA, 11 bp, Artificial sequence
  Synthetic sequence
  misc_feature (3)..(4): n is a, c, g, or t
  misc_feature (9)..(11): n is a, c, g, or t
tanntttgnnn

SEQ ID NO: 373 - DNA, 28 bp, Artificial sequence
  Synthetic sequence
  misc_feature (1)..(11): n is a, c, g, or t
  misc_feature (19)..(20): n is a, c, g, or t
nnnnnnnnnnnrrrrrrrnncgtaaatg

SEQ ID NO: 374 - DNA, 28 bp, Artificial sequence
  Synthetic sequence
  misc_feature (1)..(20): n is a, c, g, or t
nnnnnnnnnnnnnnnnnnnncgtaaatg

SEQ ID NO: 375 - DNA, 28 bp, Artificial sequence
  Synthetic sequence
  misc_feature (1)..(9): n is a, c, g, or t
  misc_feature (21)..(21): n is a, c, g, or t
nnnnnnnnnwwwaaawwtwanaataatg

SEQ ID NO: 376 - DNA, 20 bp, Artificial sequence
  Synthetic sequence
tggtgttcagtgctttgctc

SEQ ID NO: 377 - DNA, 20 bp, Artificial sequence
  Synthetic sequence
agctcaatgcggtttaccag

SEQ ID NO: 378 - DNA, 20 bp, Artificial sequence
  Synthetic sequence
cgttccattaggcagttggt

SEQ ID NO: 379 - DNA, 20 bp, Artificial sequence
  Synthetic sequence
caacccatagggcagtcatc

SEQ ID NO: 380 - DNA, 17 bp, Artificial sequence
  Synthetic sequence
aaaaaaaaaaaaaaaaa

SEQ ID NO: 381 - DNA, 91 bp, Artificial sequence
  Synthetic sequence
aaaaaaccccgcccctgacagggcggggttttttttttcacttgaactttcaaataatgttcttataaaaccagtgtcgaaagaaacaaag

SEQ ID NO: 382 - DNA, 91 bp, Artificial sequence
  Synthetic sequence
aaaaaaccccgcccctgacagggcggggttttttttttcacttgaactttcaaataatgttcttatatatgcagtgtcgaaagaaacaaag

SEQ ID NO: 383 - DNA, 91 bp, Artificial sequence
  Synthetic sequence
gtttgcaatggttaatctattgttaaaatttaaagtttcacttgaactttcaaataatgttcttatatgtgcagtgtcgaaagaaacaaag

SEQ ID NO: 384 - DNA, 91 bp, Artificial sequence
  Synthetic sequence
gtttgcaatggttaatctattgttaacatttaaagtttcacttgaactttcaaataatgttcttatattttcagtgtcgaaagaaacaaag

SEQ ID NO: 385 - DNA, 91 bp, Artificial sequence
  Synthetic sequence
gtttgcaatggttaatctattgttaaaatttaaagtttcacttgaactttcaaataatgttcttctatttgcagtgtcgaaagaaacaaag

SEQ ID NO: 386 - DNA, 91 bp, Artificial sequence
  Synthetic sequence
gtttgcaatggttaatctattgttaaaatttaaagtttcacttgaactttcaaataatgttcttatatttccagtgtcgaaagaaacaaag

SEQ ID NO: 387 - DNA, 91 bp, Artificial sequence
  Synthetic sequence
gtttgcaatggttaatctattgttgaaatttaaagtttcacttgaactttcaaataatgttcttatatttgcagtgtcgaaagaaacaaag

SEQ ID NO: 388 - DNA, 91 bp, Artificial sequence
  Synthetic sequence
gtttgcaatggttaatctattgttaaaatttaaagtttcacttgaactttcaaataatgttcttatatttgcagtgtcgaaagaaacaaag

SEQ ID NO: 389 - DNA, 55 bp, Artificial sequence
  Synthetic sequence
tgttaaaatttaaagtttcacttgaactttcaaataatgttcttatatttgcagt

SEQ ID NO: 390 - DNA, 57 bp, Artificial sequence
  Synthetic sequence
attgttaaaatttaaagtttcacttgaactttcaaataatgttcttatatttgcagt

SEQ ID NO: 391 - DNA, 63 bp, Artificial sequence
  Synthetic sequence
tttaaagtttcacttgaactttcaaataatgttcttatatttgcagtgtcgaaagaaacaaag

SEQ ID NO: 392 - DNA, 73 bp, Artificial sequence
  Synthetic sequence
attgttaaaatttaaagtttcacttgaactttcaaataatgttcttatatttgcagtgtcgaaagaaacaaag

SEQ ID NO: 393 - DNA, 75 bp, Artificial sequence
  Synthetic sequence
gtttgcaatggttaatctattgttaaaatttaaagtttcacttgaactttcaaataatgttcttatatttgcagt

SEQ ID NO: 394 - DNA, 114 bp, Artificial sequence
  Synthetic sequence
gactaccttttttttgttttgtttgcaatggttaatctattgttaaaatttaaagtttcacttgaactttcaaataatgttcttatatttgcagtgtcgaaagaaacaaagtag

SEQ ID NO: 395 - DNA, 60 bp, Artificial sequence
  Synthetic sequence
gtttcacttgaactttcaaataatgttcttatatttgcagtgtcgaaagaaacaaagtag

SEQ ID NO: 396 - DNA, 80 bp, Artificial sequence
  Synthetic sequence
atctattgttaaaatttaaagtttcacttgaactttcaaataatgttcttatatttgcagtgtcgaaagaaacaaagtag

SEQ ID NO: 397 - DNA, 100 bp, Artificial sequence
  Synthetic sequence
tgttttgtttgcaatggttaatctattgttaaaatttaaagtttcacttgaactttcaaataatgttcttatatttgcagtgtcgaaagaaacaaagtag

SEQ ID NO: 398 - DNA, 17 bp, Artificial sequence
  Synthetic sequence
aaaaaaaaaaaaaaaaa

SEQ ID NO: 399 - DNA, 37 bp, Artificial sequence
  Synthetic sequence
cacttgaactttcaaataatgttcttatatttgcagt

SEQ ID NO: 400 - DNA, 63 bp, Artificial sequence
  Synthetic sequence
  misc_feature (6)..(12): N can be any nucleotide, and the Ns at these positions can be present or absent such that a total number of 3 to 7 Ns can be present.
  misc_feature (18)..(55): N can be any nucleotide, and the Ns at these positions can be present or absent such that a total number of 36 to 38 Ns can be present.
  misc_feature (58)..(59): N can be any nucleotide
gttaannnnnnngttaannnnnnnnnnnnnnnnnnnnnnnnnnnnnnnnnnnnnntanntttg

SEQ ID NO: 401 - DNA, 78 bp, Artificial sequence
  Synthetic sequence
  misc_feature (6)..(12): N can be any nucleotide, and the Ns at these positions can be present or absent such that a total number of 3 to 7 Ns can be present.
  misc_feature (18)..(55): N can be any nucleotide, and the Ns at these positions can be present or absent such that a total number of 36 to 38 Ns can be present.
  misc_feature (58)..(59): N can be any nucleotide
  misc_feature (64)..(75): N can be any nucleotide, and the Ns at these positions can be present or absent such that a total number of 4 to 12 Ns can be present.
gttaannnnnnngttaannnnnnnnnnnnnnnnnnnnnnnnnnnnnnnnnnnnnntanntttgnnnnnnnnnnnngaa

SEQ ID NO: 402 - DNA, 64 bp, Artificial sequence
  Synthetic sequence
  misc_feature (6)..(12): N can be any nucleotide, and the Ns at these positions can be present or absent such that a total number of 3 to 7 Ns can be present.
  misc_feature (18)..(33): N can be any nucleotide, and the Ns at these positions can be present or absent such that a total number of 14 to 16 Ns can be present.
  misc_feature (37)..(56): N can be any nucleotide, and the Ns at these positions can be present or absent such that a total number of 18 to 20 Ns can be present.
  misc_feature (59)..(60): N can be any nucleotide
gttaannnnnnngttaannnnnnnnnnnnnnnnttgnnnnnnnnnnnnnnnnnnnntanntttg

SEQ ID NO: 403 - DNA, 79 bp, Artificial sequence
  Synthetic sequence
  misc_feature (6)..(12): N can be any nucleotide, and the Ns at these positions can be present or absent such that a total number of 3 to 7 Ns can be present.
  misc_feature (18)..(33): N can be any nucleotide, and the Ns at these positions can be present or absent such that a total number of 14 to 16 Ns can be present.
  misc_feature (37)..(56): N can be any nucleotide, and the Ns at these positions can be present or absent such that a total number of 18 to 20 Ns can be present.
  misc_feature (59)..(60): N can be any nucleotide
  misc_feature (65)..(76): N can be any nucleotide, and the Ns at these positions can be present or absent such that a total number of 4 to 12 Ns can be present.
gttaannnnnnngttaannnnnnnnnnnnnnnnttgnnnnnnnnnnnnnnnnnnnntanntttgnnnnnnnnnnnngaa

SEQ ID NO: 404 - DNA, 65 bp, Artificial sequence
  Synthetic sequence
  misc_feature (6)..(12): N can be any nucleotide, and the Ns at these positions can be present or absent such that a total number of 3 to 7 Ns can be present.
  misc_feature (19)..(34): N can be any nucleotide, and the Ns at these positions can be present or absent such that a total number of 14 to 16 Ns can be present.
  misc_feature (38)..(57): N can be any nucleotide, and the Ns at these positions can be present or absent such that a total number of 18 to 20 Ns can be present.
  misc_feature (60)..(61): N can be any nucleotide
gttaannnnnnngttaaannnnnnnnnnnnnnnnttgnnnnnnnnnnnnnnnnnnnntanntttg

SEQ ID NO: 405 - DNA, 55 bp, Artificial sequence
  Synthetic sequence
agttaatgcacgttaaagtatttgctactgagaaatatatccgtatatttgcagt

SEQ ID NO: 406 - DNA, 114 bp, Artificial sequence
  Synthetic sequence
gagtaactacgataataaagtgataattcaatgttaaaacagttaatgcacgttaaagtatttgctactgagaaatatatccgtatatttgcagcgtagaagttattactaacg

SEQ ID NO: 407 - DNA, 91 bp, Artificial sequence
  Synthetic sequence
tgataattcaatgttaaaacagttaatgcacgttaaagtatttgctactgagaaatatatccgtatatttgcagcgtagaagttattacta

SEQ ID NO: 408 - DNA, 17 bp, Artificial sequence
  Synthetic sequence
aaaaaaaaaaaaaaaaa

SEQ ID NO: 409 - DNA, 44 bp, Artificial sequence
  Synthetic sequence
gataaaacgaaaggctcagtcgaaagactgggcctttcgtttta

SEQ ID NO: 410 - protein, 30 aa, Artificial sequence
  Synthetic sequence
HHHHHHGGDYKDHDGDYKDHDIDYKDDDDK

SEQ ID NO: 411 - protein, 7 aa, Artificial sequence
  Synthetic sequence
RYTVELA

SEQ ID NO: 412 - protein, 20 aa, Artificial sequence
  Synthetic sequence
VTLVGNTFLQSTINRTIGVL

SEQ ID NO: 413 - protein, 6 aa, Artificial sequence
  Synthetic sequence
MQPPGC

SEQ ID NO: 414 - protein, 8 aa, Artificial sequence
  Synthetic sequence
TEEEQQLY

SEQ ID NO: 415 - protein, 3 aa, Artificial sequence
  Synthetic sequence
KPV

SEQ ID NO: 416 - protein, 9 aa, Artificial sequence
  Synthetic sequence
YCWSQYLCY

SEQ ID NO: 417 - protein, 14 aa, Artificial sequence
  Synthetic sequence
TSLDASIIWAMMQN

SEQ ID NO: 418 - protein, 4 aa, Artificial sequence
  Synthetic sequence
AAAA

SEQ ID NO: 419 - protein, 4 aa, Artificial sequence
  Synthetic sequence
AAAA

SEQ ID NO: 420 - protein, 8 aa, Artificial sequence
  Synthetic sequence
GSGSSGGS

SEQ ID NO: 421 - protein, 8 aa, Artificial sequence
  Synthetic sequence
SGPTTAPG

SEQ ID NO: 422 - protein, 8 aa, Artificial sequence
  Synthetic sequence
SGPTGHGR

SEQ ID NO: 423 - protein, 8 aa, Artificial sequence
  Synthetic sequence
SGPTGMAR

SEQ ID NO: 424 - protein, 8 aa, Artificial sequence
  Synthetic sequence
SGPTASPL

SEQ ID NO: 425 - protein, 8 aa, Artificial sequence
  Synthetic sequence
SGPTTAPF

SEQ ID NO: 426 - protein, 8 aa, Artificial sequence
  Synthetic sequence
SGPTAAPA

SEQ ID NO: 427 - protein, 4 aa, Artificial sequence
  Synthetic sequence
GHGR

SEQ ID NO: 428 - protein, 4 aa, Artificial sequence
  Synthetic sequence
GMAR

SEQ ID NO: 429 - protein, 4 aa, Artificial sequence
  Synthetic sequence
ASPL

SEQ ID NO: 430 - protein, 3 aa, Artificial sequence
  Synthetic sequence
VPY

SEQ ID NO: 431 - protein, 4 aa, Artificial sequence
  Synthetic sequence
TAPY

SEQ ID NO: 432 - protein, 3 aa, Artificial sequence
  Synthetic sequence
VPF

SEQ ID NO: 433 - protein, 4 aa, Artificial sequence
  Synthetic sequence
TAPF

SEQ ID NO: 434 - protein, 5 aa, Artificial sequence
  Synthetic sequence
STAPF

SEQ ID NO: 435 - protein, 5 aa, Artificial sequence
  Synthetic sequence
GTAPF

SEQ ID NO: 436 - protein, 5 aa, Artificial sequence
  Synthetic sequence
TTAPF

SEQ ID NO: 437 - protein, 5 aa, Artificial sequence
  Synthetic sequence
PTAPF

SEQ ID NO: 438 - protein, 6 aa, Artificial sequence
  Synthetic sequence
SSTAPF

SEQ ID NO: 439 - protein, 6 aa, Artificial sequence
  Synthetic sequence
GSTAPF

SEQ ID NO: 440 - protein, 6 aa, Artificial sequence
  Synthetic sequence
TSTAPF

SEQ ID NO: 441 - protein, 6 aa, Artificial sequence
  Synthetic sequence
PSTAPF

SEQ ID NO: 442 - protein, 6 aa, Artificial sequence
  Synthetic sequence
SGTAPF

SEQ ID NO: 443 - protein, 6 aa, Artificial sequence
  Synthetic sequence
TGTAPF

SEQ ID NO: 444 - protein, 6 aa, Artificial sequence
  Synthetic sequence
GGTAPF

SEQ ID NO: 445 - protein, 6 aa, Artificial sequence
  Synthetic sequence
PGTAPF

SEQ ID NO: 446 - protein, 6 aa, Artificial sequence
  Synthetic sequence
STTAPF

SEQ ID NO: 447 - protein, 6 aa, Artificial sequence
  Synthetic sequence
GTTAPF

SEQ ID NO: 448 - protein, 6 aa, Artificial sequence
  Synthetic sequence
TTTAPF

SEQ ID NO: 449 - protein, 6 aa, Artificial sequence
  Synthetic sequence
PTTAPF

SEQ ID NO: 450 - protein, 6 aa, Artificial sequence
  Synthetic sequence
SPTAPF

SEQ ID NO: 451 - protein, 6 aa, Artificial sequence
  Synthetic sequence
GPTAPF

SEQ ID NO: 452 - protein, 6 aa, Artificial sequence
  Synthetic sequence
TPTAPF

SEQ ID NO: 453 - protein, 6 aa, Artificial sequence
  Synthetic sequence
PPTAPF

SEQ ID NO: 454 - protein, 4 aa, Artificial sequence
  Synthetic sequence
AAAA

SEQ ID NO: 455 - protein, 4 aa, Artificial sequence
  Synthetic sequence
AAAA

SEQ ID NO: 456 - protein, 4 aa, Artificial sequence
  Synthetic sequence
AAAA

SEQ ID NO: 457 - protein, 4 aa, Artificial sequence
  Synthetic sequence
AAAA

SEQ ID NO: 458 - protein, 281 aa, Bacteroides thetaiotaomicron
MKTIKQIVFCVSLLLVMNCFYSCSNSNDVVINTQQNQEKTQDVEIQELIDFIETLNANKIQTRGPFWNRIKRFLVGDAWGYGWGVNKGLTPRGGLITAVVFSLICAASDDDLPRNWWHLSSNWKVYDAPLRPYEIIGNDHNKTIYNMMREDPVIANGTFSNYYLYNSTNKKLKSYGYTEEMPLLLQTRLLEIMDLVKKSTSVDQLMNLMKQEFPQRVSEFQLVESYINGLVNMDDKSTVRDYTKQVYAQIDASSLDVSAVSRLKTMIAIAENSKFLWVETK

SEQ ID NO: 459 - protein, 820 aa, Bacteroides thetaiotaomicron
MMKKTILLTSIIAIAIVSMLSSCVDSEKDLYDPSYQTANPMGDGFAAPDGFDWNMTTTSILNIEIDDELYNQIEILDANPFSTSDYHILAKGVAKKGQAFSQEINYTEGTNYLYIRKTDSRSRVSISTWDVSKNKEFVGSRTTRVAKATIGSYNIPEKYPEETYDTTGAIELTGNTNWNQSNHHLEAGKSYIIKNKFNGEINHTSGYLNGGRFTIFVEGEWTPSQNQIQSADIIILKGGKINTDSFTSFLIADNSILTIQSGGSLIGNNINLAAIGVLLKNFGTISVNSMKDLNTTSILYNAPKATINVTGKSVASWEQSVFTKGAIYNFGELTIQEGALKFNSQDATCYFYNGTEATINTPTFIIGGIGVNDGTVNAQKISNDNGGNPTFTNNCSLYAQNSFEFGGTSGTIIMNKGILAGGVENGTFIAIPSFKCGNSGSTFELNNGSMIKAEIMDIPNVTFKAAGTRSLIKSTKSISTGWTTKFNGNLDIECPEGEFAKGVPANNPNYIMENSVELYIPNGSKTIITSCGELSEIPDPTPDPEDPEFPIEVEDNKDYTYLFEDQWPLYGDYDMNDIVLTIQKRKIYTNKENKVTKFELSIDLSAAGATKSIGAAIMLDNVPANAITQSVEFSDNTLAKNFNLNNNNIESGQDYAVIPLFDDAHKVLGRDRYEQINTVSDYAGNTKPKNISFSITFNNPTISADAFNVNNLNVFIIVDGNRNPRKEIHVAGYQPTKLANTDLFGGNNDNSHHGSKKYYISKENLAWGIMVPSNFKWPLEYVNIKTAYSQFSDWVTSGGTENEKWWNDFDVNKVFQTNKN

SEQ ID NO: 460 - protein, 230 aa, Bacteroides thetaiotaomicron
MFFLAGICAALAACSSDSDDVSSSPSNTPAILEVVSYKFVQEETDVVERVEYPVVVLQHKVNDKDEPLPMIYAWDVEEEENSLFVLTEGSLPVNAENLADLKIPVPFIDAGGKLFIDGTGAKTPLIFGETLKVKNGSRSIGNVKYKIPPYSTYELTKQECGYRCTLTFYLVLKAVNKGEEYHLKGRWTGEQLREQKMGLIDLSDEKGAEKTVLMEAPIELFEKDYETGLD

SEQ ID NO: 461 - protein, 523 aa, Bacteroides thetaiotaomicron
MMKNMILPIAFTALIASMTACSDETDPILTQKNWDGTATYFQSSDEHGFSMYYKPQVGFVGDPMPFYDPVAKDFKVMYLQDYRPNPEATYHPIFGVATKDGATYESLGELISCGGRDEQDAAIGTGGTIYNPADKLYYTFYTGNKFKPSSDQNAQVVMVATSPDFKTWTKNRTFYLKGDTYGYDKNDFRDPFLFQTEDGVYHMLIATRKNGKGHIAEFTSADLKEWESAGTFMTMMWDRFYECPDVFKMGDWWYLIYSEQASFMRKVQYFKGRTLEDLKATTANDAGIWPDNREGMLDSRAFYAGKTASDGTNRYIWGWCPTRAGNDNGNVGDVEPEWAGNLVAQRLIQHEDGTLTLGVPDAIDRKYTSAQEVKVMAKDGNMIESGKTYTLGEGASVIFNRLKVHNKISFTVKTASNTDRFGISFVRGTDSASWYSIHVNADEGKANFEKDGDDAKYLFDNKFNIPADNEYRVTIYSDQSVCVTYINDQLSFTNRIYQMQKNPWSLCCYKGEITVSDVQVSTY

SEQ ID NO: 462 - protein, 570 aa, Bacteroides thetaiotaomicron
MKKIIYIATIGITLLTTSCDDFLDRQVPQGIVTGDQIASPEYVDNLVISAYAIWATGDDINSSFSLWNYDVRSDDCYKGGSGTEDGGVFNALEISKGINTTDWNINDIWKRLYQCITRANTALQSLDQMDEKTYPLKNQRIAEMRFLRGHAHFMLKQLFKKIVIVNDENMEPDAYNELSNTTYTNDEQWQKIADDFQFAYDNLPEVQIEKGRPAQAAAAAYLAKTYLYKAYRQDGADNALTGINEEDLKQVVKYTDPLIMAKGGYGLETDYSMNFLPQYENGAESVWAIQYSINDGTYNGNLNWGMGLTTPQILGCCDFHKPSQNLVNAFKTDSQGKPLFSTYDNENYEVATDNVDPRLFHTVGMPGFPYKYNEGYIIQKNDDWSRSKGLYGYYVSLKENVDPDCDCLKKGSYWASSLNHIVIRYADVLLMRAEALIQLNDGRITDAISLINEVRSRAAGSTMLIFNYKEDYGVNFKVTPYDLKAYAQDEAMKMLKWERRVEFGMESSRFFDLVRWGEAKDVINAYYVTEASRCSIYKNAGFTENKNEYLPVPFEQISASNGNYTQNFGW

SEQ ID NO: 463 - protein, 1038 aa, Bacteroides thetaiotaomicron
MKRKFVKVMFFGALALSTVTYVGCKDYDDDIKNVQEQIDAINKKGADVTTEAMTAAINSAVAGLQTQLDAIASKADKTALDELKKTVTDLQAALNNKADAIKLTELQTKLDEAIAKVNASIESSVGAAKTELQAKIDKLQADLEKADADAAEKIATELAAVKTELQGLINANGEKIADLYEKIKGLDAIKTKIEALEEADKNFVTISQLNDYMNSEAVKAYVDEALVDYLTSAEVTEQVNAVKTYVDGTFKAAIMAEIKAEYLSLEKYNADMEALMEKIDTYVGKEDAAYKKIFTDITALQTYQQQTIEVLVASLAENNTIENANKIVGALEDITTLQTEIAKCAKTTDLDAYVKGTELGGLIDTHLQDKFAGYDGEIADIKKRLLALEIDVDGLKSMVQSVTFVPSDSEGKVYFSSYYVVSEGETEKTLIASNNTVTVKFRVSPVSAAKNFFDNYTASFDAQEITTRAANIFEGEGKVENADEGIISFVISTTTEQSHAVCLNIIAKNSVPENAETAIKGTDYFTNINSNYFPVIVTTKTISGIQVESTNSTVSSIYYNKEASKIDYKAGVALKARFVDGGNATLDPENVDLSNLVTSYEFDKDMTNPDAPVILDGDGSYKLEDGVLSLKNYAAESAGKEATVVAYVAVKDGDNTLKEFKSTAYAKVTAANYTDGTVNLTPVAPTDVLYDGTKVTSTSAYALTELYTSAGSKDIYEAIPVDKFTPTADKGVTFVIGEKNALTINVPKGTAAGTYSPTLKIQVDAVKVINVSASVKVSYQDIKVVIDGNIVSAGAMTLKPTYQGSYEKPTSVGFTLDLATLYTNYATQLAAVKKVGGDITLTLKDAVKGASINGTTLTVDKTYNAHADDINPIVIVAKTVYGEATLDNSTVETKINLTEISGTWAFTIKSAAFGKDNLNSTLNIAKTASWTDYRGKVMWADGAEKAQGTTEWGAKPLSVYGFTAPVFSIATADADKAKYVNITTDGKISLTDAGKNLASAITLKVNVAAVSNWGTITDFASNNEVTVKIDLSQDAADI

SEQ ID NO: 464 - protein, 413 aa, Bacteroides thetaiotaomicron
MMTGLTLLSCSTENDEFKKELPPTEQPSEPTGALLERFSIDQLPAKTIYALGESIDLTGLKVTGEYDDGKQRSVNVAPKQISGFSSSVPVDKQEVTITIEGKQKSFTIQVAPVRVENGVLTEVLKGYDEIILPNSVKSIPKNAFNGSKINKVTLNEGLKSIGDMAFFNSTIQEVIFPSTLEQLEENIFYYCYHLKKADLSRTKLTKLPASTFVYAGVEEVLLPATLTEIDAQAFLKTSQLKTIEIPENVRTIGLEAFRESSITTVKLPNGVTNIAQRAFYYCPELTEVTTYGTVFNDDPEAMIHPYCLEGCPQLTRFEIPQSIRILGQGLLGGNRKVTQLTIPANVTQINFSAFNNTGIKEVKVEGITPPQVFEKIWYGFPDDITVIRVPAESVEKYKTAAGWQDYTNKIQAS

SEQ ID NO: 465 - protein, 399 aa, Bacteroides thetaiotaomicron
MSGTAEVNPITVDVYLDITVENISTLKDLTVKFDNYDEDLHYVKEVTDNSVKVDGIIPGIYSVTVSGTAIDTENNEYYINGNSVNAALFKHGSALNIEVQGLKVSPLIFKEIYYCGSRPEKGGVYFRDQFYEIYNNSADILYLDGIYFANLTPGTATTKLPIWPEADGNNYAYGERVWKFPGNGTEYPLAPGESCIISQFAANHQLDIYNPQSPIDGSSSEFEFNMNNPNFPDQAAYDMQHVFYQGKAEMGSIPQYLTSVFGGAYVIFRVPEGEAWDPVNDENMKTTDLSKPNSNVYYAKIPIKYVLDAVEAVNNESKMNAKRVPGVLDAGITWVGATYCGLGIARKLSTDEEGNPIIREETGTYIYQDTNNSTDDFERGVVPVMRRNGAKMPSWNHTL

SEQ ID NO: 466 - protein, 144 aa, Bacteroides thetaiotaomicron
MKKFNDANVGLFVLLTACLSLFSCNNDNDNYPKDYVGFEKSTRTVECDKNQSESELQIKIIATDKSKEDRTVLLATPALPAGQAPIMKLTETKVTIKAGQKSATTTIKLYPKKMVLKQQNITLSCTPQWKEGSVSKLTILLKRN

SEQ ID NO: 467 - protein, 565 aa, Bacteroides thetaiotaomicron
MKKIQYVKLVGLLTILLFLNISCKDDDTLLRGSGITEQSWSTNQTYFASAEQTLTFTFTTLSSWTAQNSSTALLSLDNTAGNSGENTIKVTVHKSSQEQGTITIKVNGYSSASNIKIQLSDDDVQGYEINYSVDQYLREKYLWNDDYKLLTPNFRQAYDEFLRNTLLSMTTNTLDKKRNSNGTYSLFSFIQKLDPDLQTSRSAKEKKTLEYNYGFVNFIAVGNRNNSNYGLVIQGVHKGSSADKEGLKRGMEITEIDNQRITTTNVQACYSKLIKPSSPTSIKVKDKDGKVYTINSGPIYANPIIHHQVNEKIGYLVYSAFESGFDQELFDVFKEFKSQNITELILDLRYNGGGDVTSANLISSCIAGDLCIDKTFASYRYNDERMKVLGNQRPIQKFAYSQYDNLSTSLSAGGLNLRKIYCLVTDDSASASELVINALRGIDIEVILIGTTTHGKNVGMEGVELTAGTDKYLLFPITFQAYNAKGFGDFENGFTPDYEINENKPNGEYFEGYGDFGAESDPLYAKAISLISGNEVTTPTRAVNQAKEQMLVIATPRLNRIGMIK

SEQ ID NO: 468 - protein, 498 aa, Bacteroides thetaiotaomicron
MKKILLYASLATTALFAGCDLNINDDPNYPMNDQVTADLIFPSISASIASAVGGEIYNYAGFFAQYYEQKPESNQYNTLCEYTFTESSQQMDYSYRILFAGALEDAKQVLEKTTNPADRFATTILRAYAFQIMVDNTSDSPYSEALQGNANATPKWDTGETVYKGILGEIDAAEAALDGSGMDVPDLIFNKNIAQWKGFANALRLRMYLRFIDANIDAASYTEKVKTLVQNNEFFTGDVKLDCFLDETDKRNPWYNTNAVGLTGNHCAAYPLVSYLSSTGDPRIAYGISKTDADGKYVGQLPGGKTHMQSILGTDNWKNKNVSAIDYSIGATKPVYFFTQAELQFLIAEVYARFHNDDANAKSAYEAGVTADFAVRGFAGQENTILEGACAWSAASTQADKLNLIYMQKWVSLFYMDHMEAWSEIRRTDCPKLSSYSAAQIQASESVYTPGELVAPWTNGLEAGGLMKRMTYPLSARQQNVNTPAGVPGSTPVWWDIK

SEQ ID NO: 469 - protein, 386 aa, Bacteroides thetaiotaomicron
MFYCMKKNLLFAAMAVTALASCSNDDVVDVNNGGGISFRASLDRAVTRTNVTSLQNLAAFNVTAIGDGKNYFTDLGVSSADNGVNWTTASTYYWPGYELAFFAYAPQAPAGTVSIDNASKKITGFSPAQAVADQKDLVISYNTGTKAVNEGPGVAMNFKHALSQIEVKAKCSNDKIKIEIMGVKLVNAAAKAEFAFPETETKSSYVLQQSQWSNWSEKDDPTKAYMIKGGAPVILTADAQRIMFGDDNFMLIPQQLTAWDGTTATTGAYLSVLCRIYSLDGANEILLYPQPAAGDAKDGKYAFSAVGINTNWEPGKKYTYTLNFCGNGGGTGEIDPNPTDPTNPTDPTIDPDPVPGGNGGDPVLGNPIKFTVTVDEWTDQPVDVAM

SEQ ID NO: 470 - protein, 426 aa, Bacteroides thetaiotaomicron
MKQHAHLLILTIMFLTSCSDDTEVMKQESSPPSLTEKAPTYRTKENAIIEVELFIKNNRNNTRNSSFLNYSINNEIYFYRDTITNQTYPSFYIANAEGGNGYAIVSANLYTTPIIAYSESGNLSLSDTLQYQELSFFFDLVQNYISNNKKYEIEFKEENDDDNSLDTSQTRGRRRPIYIKKPGEWEETERVQPLISVKWGQRSPYNNAAPLIEGQRALTGCVATAIAQVMAYHEKPSGYNGVSYNWSEMKQFPTTPAVAHLFRSIGDLVKMDWGTDTSGAKRKNIPQCFEKMGYRKPNNPQIYSQWDVITSIKAKCPVIICGNSVRKKILGIKYYQNGHAWVSDGYFHRERNVDVYRKGSDKVHHSYTEKEDYLHLNWGWNGNSNGYYLAGIFNGGEGPTFPSTRAAGKGNYPYNVEIIPYINIIK

SEQ ID NO: 471 - protein, 702 aa, Bacteroides thetaiotaomicron
MIFHRIFRFTYFLIFCIWGLQSCTKDDLIETPADTDSETTENPYGIIRIAEKDLTPDVFKLMLQDDEPATILFNNTQRGFRVNQPLQVSITEQQELFIRFYSPRPVKEVTVWATISGYEEAFQLAKFDVLPAFTEFHKELPMLTQSKRYITRSGKEIQIMANPHLSAADFKLEIECNDKYYQKLLSTKSKYNVRFSAYSQTGSWAYPLYPAHAREAVAMMLNYGYMFSSKEFAEELEKYRGKLHSDANKTVIDIDMLLKKVINHSGFVIGKVTTVDGLGGGETYGLNEWCFLEHYADDGAHTSATFHELGHCLGYGHSGNMTYEQTGTGWITLCATVYNKLCIEKKLPVYSRRFMHTRRYGKLYGSSKYNASRYIIEDPELDAIDGGLSPILKEEDEDTAQGTPLSCIITYKDIPQATESTFAPKDVCVYGNRIYIVNNASGNFSLEILEEQNGKLTHIKSLKEWTEGGATKGFAATPNGVTVAHGKIYVTNEQSRTDIFDEKTFELVATIGTGSWGEGSNQTVHAFDVLVHRGCVFIRDKKRVCVFIEDDIVPGKSFKNVPNYCRTSNMGEAMGTYGQTIGNDGLLYTTHQGNKKIYVFDLQAMREQVEWKAQRVINLTSYSPYDIAFIGKRMFVSFATGKNQPIALAEVNPETGTVIKDYTTVEGHTFSNVEKMSMARQTLFIVDRNAHTVTGIPVEKLN

SEQ ID NO: 472 - protein, 534 aa, Bacteroides thetaiotaomicron
MFLLIITSCYEDKGNYDYREMNDIEISVETESSSYALGDKVTSKPKLVFTLGKESSDLSYEWTFDGHVIADTRDLEWVADTIASTKELRLAVMDNNTGVTYFGSTYISVSSAYASNGWVVLSEKEGISTLAFLREQTEEGILKPVVTRDIYQMINGVPMGTQPVSMYPHWTERWDGEDKTSWLWVAQKGGQGAVDISGSSYKQEGILSQMFLSKSYPEGFVPVGVIDMQFLTMAIGEDGTIYTRVKDSNLLFNSSNFLDRPLTSDEEGKVKVDGSMIAYAPFDEHGGMVLYDKNSSQYLHIADYKSWQGYNYSGKVLPLKVEEYEYGPSDARLDNMKDYSVYFVGASLVDWGDVSYMSIIKDKAGRFYIQKFTVEAYGGGSSVTKVGASFTSQSEIEGLSSVIDGTSKNCFYLCRNQDKAPYLFISKGETLYFYYTDGNKIYTCAQFDSPITSIDAECFNNKYIIVGLENGDVYILKGDDDNSDYTLKKYVIQQNKVIQVNDAENKFVLFHEKDFGRIIQVRYKWKESWNESFS

SEQ ID NO: 473 - protein, 429 aa, Bacteroides thetaiotaomicron
MMKQYIFSALCLVSGAFCLSSCNDDKEARPYTPDYEIVPEYTNADTWKAYEAFNEHLLDQNKFIYKSSTADKAAVDRWNGAAAIWCQPTYWDMAMNAYKRAKAEGDTQKEQKFKQLCDDLFAGNKAHYANFDFDDNNENTGWFIYDDIMWWTVTLARAYELFGVEEYLSLSEESFGRVWYGSEKVGDTGSYADPEKGLGGGMFWQWQPIKNPNPNEADHGKMACINFPTVVAALTLYNNVPTGRTESTDSHPSYQTKEQYLAKGKEIYAWAVENLVDVTTGQVADSRHGNGNPAWKDHVYNQASYIGASVLLYKATGEKQYLDNAVMAADYTMNTISGTFDLLPFETGAEQGIYTAVFAQYIAMLVYDCDQTQYIPFVKRNINYGWANRDKTRDICGGDYTKLQVEGDAVESYSASGIPALMLLFPTDK

SEQ ID NO: 474 - protein, 235 aa, Bacteroides thetaiotaomicron
MITKKKKYTLYYVMALACGLVASFFIYSCSADGYYSEEIEKNEVTNTRALSSKMINNGSTLIDSIASSDEFWEFEMSSELLADKFHEYTSILSEEEYDKLMENLNDDDYVEDFMRKANLENELQQLAKAKENLIKHTRFLRLSADERTQLFILYAESNELTKVKLLKTREEGGSTSSCEEQKQAAYKQAKADYDNAIANCQNGSMPSGCLIQAAAKYDRAKDIANKEYKECIANK

SEQ ID NO: 475 - protein, 536 aa, Bacteroides thetaiotaomicron
MKQIIFIAILLTCAFGACSSDNDGDEQSASVQAPSDITIERMGKTKVLLRWKDNSNNETGFSILLRKADTSENIEIAKVSANVTEYTIENGLEEGNIYYFGVRAFSATNTSRAIYELYRLVALGDEPSIAIIGSIKANSTCISSSYQVTNIAGQTNVKYGLCWSTENTPTINDQKQNGPEVAEDGKVFQVIPNTLLDYGKSYKVRAFLTTSTGTYYSAESTVSLETEPQAIQLTWNKLTKSTLPAEIELYETTSNLNGSNFHAWYAIGDLSTGKVEVRVHIPSSPATIDTQSASFNGDCYLLVNGGYFYNGNHTGIAVINSIKSGSVSAVRGSLKTGDTEYNSMYNVTRGTFGVDASGKPNVVWTGTDASSNVFYFDRPLPSVKGENKYGIVTNENPTTAISWSPKYALSAGPVLLKDKKIPFDFTETSKGTDYYLSNYEIIPYDIFGANVTPDRTAIGYREDGKVVIFICDGRITASGGATLTELAQIMKGLGCVGAINLDGGGSTGMVVGDEHLNDMTGGNRAVVSTIGFFKKN

SEQ ID NO: 476 - protein, 629 aa, Bacteroides thetaiotaomicron
MNYSCRKTIVPIIIGTLLSGACSNDEPTGGKGHQQTYSVVLKGITVAGEESSEELKDVSVFQFSDGNLYKEEQLTPGQGGQSEISAVSGSRLYFLTGLEIPAGEKAKSEEEFRNTIIGEGLHDNSAPDFMAAVVELESGVVTRSNAEVNVIMKRGVARIDLNTTADSKTQIKEVIVENAPAETLPFLENVRASDKTVSYRKEFSSAFDGKQEGVFRLFESTRPVNIILRGTYGEVPIRLKVELPVVERNKVYELAVLNVGAEVTGVFEIKPWEEGETIVGKPDTNQRLLLNASKSRIPEGVKVDYENNILEVPATGADDMTLAFVTDTRIDISSTEGAGSGTSVGNMSVSEEAEGIVSSFNVSVAAQGSGRLGYTVLVHLKNALLSGTYDYVEIRVAPSDKQIETVEIAGNVWMAFNARSRDLEDQIYPLDGATVEDMYHKSWINTVGGLFQFGRLYMYVPWQGYNPSNNLGNQTADAPWVNDTHMPCPEGYRIPTGNEWQSLLPADQEIPGRYKAGNGETIAATLHIGEGTLITPSSGVTGTQHYVKFTSEDTGRSLIIPLAGSKGDKSSSNNPAFGKRAVLWTNERNGLPGGYAWAYWLPFEGAETTVIKKQRLQMEAFASVRCVKK

SEQ ID NO: 477 - protein, 374 aa, Bacteroides thetaiotaomicron
MKIKTLIACFILACAATSCIQDEALNSEAAIDACTGDDVQLANINADSKLINVYVNKGADLSKQKLEFVIPEGATIKINDQVAGDTEATYDFSEETHSRKFTVTSEDGQWKPVYTVKVVLAELPTSFNFEELLPSNDYDIFYEFQPGTSQEISKVLQWSSGNPGFKLTGMANSKTDYPTVQVANGFRGKGVKLETRDTGSFGAMVKMYIAAGNLFIGTFEVGNALTDPRKATNFGFQFYKRPKTLKGHYKFKAGDVYSVEGKPQEGVRDKCDIYAVMYEAENNSVMLNGDDVFTSDKLVSLARIKPEDVVESDQWTDFEIPFEPVKGRVIDDTKLKNGKYKLGIVLSSSVDGAYFKGAVGSTLYVDEVELICED

SEQ ID NO: 478 - protein, 143 aa, Bacteroides thetaiotaomicron
MKRIVFWMVALLLMSGVAMAQGNRQGGRQQMDPKTRAERMTERMVKEYSLNEDQKQQLQDVNLTWVQKMAANQGGRSKDNKAAKMTKEEREKKMAEMKKSREDYDAQLKKIMTKEQYDSYVKKQAEREKQMKEGRQNRQKRQG

SEQ ID NO: 479 - protein, 545 aa, Bacteroides thetaiotaomicron
MKIVKYIVIVSLFSISACSDDDDKKNNERPGNLVELQVDVNEINIAQGDTRTVNITSGNGEYVATSANEEVVVAEIDGNVVKLTAVEGHNNAQGVVYVSDKYFQRTKILVNTAAEFELKLNKTLFTLYSQVEGSDEALIKIYTGNGGYSLEVIDDKNCIEVDQSTLEDTESFMVKGIAQGNAEIKITDQKGKEAFVNLNVIAPKQITTDADEKGVLINSNQGSQQVKILTGNGEYKVLDAGDAKIIRLEVYGNVVTVTGRKAGETSFTLTDAKGQVSQTIHVKIAPEKRWYMNLGKEYAVWTHFAEMTGEGLEAVKVETNGFKLKKMTWELVARIDGTNWLQTFMGKEGYFILRGGDWENNKGRQMELVGIDDKLKLRTGHGAFELGKWSHIALVVDCSKGKDDYNEKYKLYVNGKQVKWDDSRKTDMDYSEIDLCAGNDGGRVSIGRASDNRCFLDGAILEARIWTVCRTEEQLKANAWELHEQNPEGLLGRWDFSAGAPTSYIEDGTNSDHELLMHISKYDSWNATEFPMSRFGEAPIEVPFK

SEQ ID NO: 480 - protein, 258 aa, Bacteroides thetaiotaomicron
MKKFNWLLVMLLLALVPALQSCDDDGYSIGDIGWDWATVRATGGGGYYLEGDRWGMIDPVASSIPWYKPVDGERVVAFFNPLADTDKGAQVKIEGIQEVLTKEVEDMTAENEEEFGNDPIVIYQGDMWLGGKFLNIIFHQYLPRSEKHRISLVQNKIEPEAPETPEALNVDEDGYIHLELRYNTYDDVTGYRGWGRVSYNLEEFYPTAKDAAETEFKGFKVTINSKENGEGRVIVLDLDHPVGVPEKAKDVHSTSFVK

SEQ ID NO: 481 - protein, 580 aa, Bacteroides thetaiotaomicron
MKKIRYIIASALVSIGLCACTDTWDSHYSKWETVIDNTEIQAVDEPAADFLKTAQDYSKMYELFDKTGVIKTWQEKNLMYTIMVVGNESTANANQPVTKAEGSEGQATAEEIFKAEAHITDALLSPSNLEDGQRLLMWNGKYVTVRIYDEPVDGMEPGIYFNGSKVKKVIKTNNAYIYDLEDYINTPKALMEYLKDLPDEEYSIFKEMVLSRTQRVFDKAASTPIGIDKTGNTVYDSVFTEKSQYFADKKLDLYSENITATLLVPSNDLIENALKEAKEKLKSWNMEREDSILNNWIFQTAFFSKKYVKQDFIYNESDPASTQDFYSVFDQQWRTTVNKVDLDNPVELSNGVAYKITSLKIPTNKILIWRIKERFETFDQLTDEDKKYYYPGYNYISTYLKDIGENVQMNRVKQYVGANQPKPWLPAVYCKSMMLWVVDTDRPGIFKFKCYRLVEDKASTTGFTAVPYKIPAGPYNFYMGFNGSRSQVNATFYLNGKKIPKCESGPIPSSTMKGSNHDRSGGGYSELYKDSRYDRDGSTDLGVVIFDKTEELEVTIEFTKGAKSDMEPTTWCFRPTVDLY

SEQ ID NO: 482 - protein, 614 aa, Bacteroides thetaiotaomicron
MSMKKNILIIGLASIFGIASGLISCSPDYETEFKVETLVVPDKSQAPITFPLLGGEHEIEVQTNVPLDRWSAQSNAEWCKVVQHEGKVVVSASANNIYKQRRAEITVAYGHQSYSITVSQFGKEPAILIGDKLQQEGYVEIIDAERETLTIPVATNLNLDNIIIPDTCNWIRLAEQPATFDAKTRAAEDVNKQELKFTLDKSTETDVRYCTIILQSSQNYSYTASFLIKQQPRGYIVEIDEDKKIYEVKAMGETITIPFKVNSPAGEVSYTYEVEESAQSWITPVSLPASRALRDVSESFIIKANTEVENQPREGKITFKSTNSTDKVPSQFVVTVKQAGFIATPPLNVINATATPGAGSIQLQWEIPEDVDFNKIKITYYDKVTKENKEILINDYKTTSYIIDDTYQCAGEYSFTINTYGPTGMETDSPVTITGISGEASEMERVTLTIDMLSDNANHVGDGGGLPALIDGKVNTYYHTKWNAPVTTEAHYVQIKLNKPLKDLCFEYDARQSGVNNGGDVKAATIYGSMNGEFFESMGNEEFNLPTTNGGHATAKNNVSGKQAYNYIRFTPTARRDKDPLDYTVAGSAWWNMSEIYLYRIRHDEAWAREQLGI

SEQ ID NO: 483 - protein, 683 aa, Bacteroides thetaiotaomicron
MKKLFKIILGATVGSTLLLSSCNFLDVDPYFEATFKEDSIFHSKKNAEGYLWNTPKGFPDAGAIWGNSWNPGESASDEITLKYQTNEFWGLQFSVGTINSRNLPIQNQWYDMYVIVARCNKMLKEVYNVPDMNEMDRRRYIGYVHFMRGYAYYHLLMNWGPLIIVGDEELSTSEPAEYYNRERATYDESVDYICDEFRLATQGIYSADEQSVNYYQRPTKGAAMALIARLRLFQASPLFNGGAAARKCFGTWKRKSDGAYYVNQEYDPRRWAVAAAAAKQLTKMGYELHTVEADAQNPYPLASNVPTANFPDGAGNIDPYHSYSDMFTGEGIIQTNKEFIWAMESSNVTNYTHHSFPVKFGGWGSMSVPQRVIDCYLMADGRTIHNSSAEYPYEPDFSRLTGESKKLGTYLLRENVPMMYANRSARFYASIGFPGRYWPMSSASTDASYVNQQFWYSHDDTNAGIAGAGNNVNDYSVSGYVPVKYIHPDDSWANGKGSVKGAFVTSPKPFPIIRYGEVLLEYVEALNRVEGTVTVEVSDNTGTLIEETVSRDPAEMAKYFNMIRYRVGLPGVDANDMAEADNFEKIIRNERQVELFNEGYRYFDTRRWGTYLDEDANSSNWRGLDVTKDRTNANGNEGFWNIVTINTQNVRDRIALPKMVFLPIRHDELLKVPNADQNFGWDR

SEQ ID NO: 484 - protein, 273 aa, Bacteroides thetaiotaomicron
MAIAATLLASCNKDEEETEIQGFKVLEYRPAPGQFINEGFDCQTMEEANAYAEERFNKKLYVSLGSFGGYITVKMPKEIKNRKGYDFGIIGNPFSGSSEPGIVWVSEDANGNGKADDVWYELKGSDEPERDYSVTYHRPDAAGDIPWEDNKGESGIIKYLPQYHDQMYYPNWIKEDSYTLKGSMLEARTEQEGGIWKNKDFGKGYADNWGSDMAKDDNGNYRYNQFDLDDAVDQNGNPVTLERIHFVKVQSAILKNVESIGEVSTEVVGFKAF

SEQ ID NO: 485 - protein, 6 aa, Artificial sequence
  Synthetic sequence
AAAAAA

SEQ ID NO: 486 - protein, 6 aa, Artificial sequence
  Synthetic sequence
AAAAAA

SEQ ID NO: 487 - protein, 6 aa, Artificial sequence
  Synthetic sequence
AAAAAA

SEQ ID NO: 488 - protein, 6 aa, Artificial sequence
  Synthetic sequence
AAAAAA

SEQ ID NO: 489 - protein, 6 aa, Artificial sequence
  Synthetic sequence
AAAAAA

SEQ ID NO: 490 - DNA, 82 bp, Artificial sequence
  Synthetic sequence
aatggttaatctattgttaaaatttaaagtttcacttgaactttcaaataatgttcttatatttgcagtgtcgaaagaaaca

SEQ ID NO: 491 - DNA, 76 bp, Artificial sequence
  Synthetic sequence
caatgttaaaacagttaatgcacgttaaagtatttgctactgagaaatatatccgtatatttgcagcgtagaagtt

SEQ ID NO: 492 - DNA, 66 bp, Artificial sequence
  Synthetic sequence
  misc_feature (6)..(12): N can be any nucleotide, and the Ns at these positions can be present or absent such that a total number of 4 to 7 Ns can be present.
  misc_feature (18)..(33): N can be any nucleotide, and the Ns at these positions can be present or absent such that a total number of 12 to 16 Ns can be present.
  misc_feature (37)..(58): N can be any nucleotide, and the Ns at these positions can be present or absent such that a total number of 18 to 22 Ns can be present.
  misc_feature (61)..(62): N can be any nucleotide
gttaannnnnnngttaannnnnnnnnnnnnnnnttgnnnnnnnnnnnnnnnnnnnnnntanntttg

SEQ ID NO: 493 - DNA, 67 bp, Artificial sequence
  Synthetic sequence
  misc_feature (6)..(13): N can be any nucleotide, and the Ns at these positions can be present or absent such that a total number of 4 to 8 Ns can be present.
  misc_feature (19)..(34): N can be any nucleotide, and the Ns at these positions can be present or absent such that a total number of 12 to 16 Ns can be present.
  misc_feature (38)..(59): N can be any nucleotide, and the Ns at these positions can be present or absent such that a total number of 18 to 22 Ns can be present.
  misc_feature (62)..(63): N can be any nucleotide
gttaannnnnnnngttaannnnnnnnnnnnnnnnttgnnnnnnnnnnnnnnnnnnnnnntanntttg

SEQ ID NO: 494 - DNA, 66 bp, Artificial sequence; identical to SEQ ID NO: 492
  Synthetic sequence
  misc_feature (6)..(12): N can be any nucleotide, and the Ns at these positions can be present or absent such that a total number of 3 to 7 Ns can be present.
  misc_feature (18)..(33): N can be any nucleotide, and the Ns at these positions can be present or absent such that a total number of 12 to 16 Ns can be present.
  misc_feature (37)..(58): N can be any nucleotide, and the Ns at these positions can be present or absent such that a total number of 18 to 22 Ns can be present.
  misc_feature (61)..(62): N can be any nucleotide

SEQ ID NO: 495 - DNA, 67 bp, Artificial sequence
  Synthetic sequence
  misc_feature (6)..(12): N can be any nucleotide, and the Ns at these positions can be present or absent such that a total number of 4 to 7 Ns can be present.
  misc_feature (18)..(33): N can be any nucleotide, and the Ns at these positions can be present or absent such that a total number of 12 to 16 Ns can be present.
  misc_feature (37)..(58): N can be any nucleotide, and the Ns at these positions can be present or absent such that a total number of 18 to 22 Ns can be present.
  misc_feature (61)..(62): N can be any nucleotide
gttaannnnnnngttaannnnnnnnnnnnnnnnttgnnnnnnnnnnnnnnnnnnnnnntanntttgc

SEQ ID NO: 496 - DNA, 63 bp, Artificial sequence; identical to SEQ ID NO: 400
  Synthetic sequence
  misc_feature (6)..(12): N can be any nucleotide, and the Ns at these positions can be present or absent such that a total number of 3 to 7 Ns can be present.
  misc_feature (18)..(55): N can be any nucleotide, and the Ns at these positions can be present or absent such that a total number of 36 to 38 Ns can be present.
  misc_feature (58)..(59): N can be any nucleotide

SEQ ID NO: 497 - DNA, 63 bp, Artificial sequence; identical to SEQ ID NO: 400
  Synthetic sequence
  misc_feature (6)..(12): N can be any nucleotide, and the Ns at these positions can be present or absent such that a total number of 4 to 7 Ns can be present.
  misc_feature (18)..(55): N can be any nucleotide, and the Ns at these positions can be present or absent such that a total number of 36 to 38 Ns can be present.
  misc_feature (58)..(59): N can be any nucleotide

SEQ ID NO: 498 - DNA, 63 bp, Artificial sequence; identical to SEQ ID NO: 400
  Synthetic sequence
  misc_feature (6)..(12): N can be any nucleotide, and the Ns at these positions can be present or absent such that a total number of 4 to 7 Ns can be present.
  misc_feature (18)..(55): N can be any nucleotide, and the Ns at these positions can be present or absent such that a total number of 34 to 38 Ns can be present.
  misc_feature (58)..(59): N can be any nucleotide

SEQ ID NO: 499 - DNA, 64 bp, Artificial sequence
  Synthetic sequence
  misc_feature (6)..(12): N can be any nucleotide, and the Ns at these positions can be present or absent such that a total number of 4 to 7 Ns can be present.
  misc_feature (18)..(56): N can be any nucleotide, and the Ns at these positions can be present or absent such that a total number of 36 to 39 Ns can be present.
  misc_feature (59)..(60): N can be any nucleotide
gttaannnnnnngttaannnnnnnnnnnnnnnnnnnnnnnnnnnnnnnnnnnnnnntanntttg

SEQ ID NO: 500 - DNA, 65 bp, Artificial sequence
  Synthetic sequence
  misc_feature (6)..(12): N can be any nucleotide, and the Ns at these positions can be present or absent such that a total number of 4 to 7 Ns can be present.
  misc_feature (18)..(56): N can be any nucleotide, and the Ns at these positions can be present or absent such that a total number of 36 to 39 Ns can be present.
  misc_feature (59)..(60): N can be any nucleotide
gttaannnnnnngttaannnnnnnnnnnnnnnnnnnnnnnnnnnnnnnnnnnnnnntanntttgc

SEQ ID NO: 501 - DNA, 106 bp, Artificial sequence
  Synthetic sequence
  misc_feature (6)..(25): N can be any nucleotide, and the Ns at these positions can be present or absent such that a total number of 0 to 20 Ns can be present.
  misc_feature (31)..(90): N can be any nucleotide, and the Ns at these positions can be present or absent such that a total number of 10 to 60 Ns can be present.
  misc_feature (93)..(102): N can be any nucleotide, and the Ns at these positions can be present or absent such that a total number of 0 to 10 Ns can be present.
gttaannnnnnnnnnnnnnnnnnnngttaannnnnnnnnnnnnnnnnnnnnnnnnnnnnnnnnnnnnnnnnnnnnnnnnnnnnnnnnnnntannnnnnnnnntttg

SEQ ID NO: 502 - DNA, 76 bp, Artificial sequence
  Synthetic sequence
  misc_feature (5)..(14): N can be any nucleotide, and the Ns at these positions can be present or absent such that a total number of 0 to 10 Ns can be present.
  misc_feature (19)..(68): N can be any nucleotide, and the Ns at these positions can be present or absent such that a total number of 30 to 50 Ns can be present.
  misc_feature (71)..(72): N can be any nucleotide
ttaannnnnnnnnnttaannnnnnnnnnnnnnnnnnnnnnnnnnnnnnnnnnnnnnnnnnnnnnnnnntanntttg

SEQ ID NO: 503 - DNA, 17 bp, Artificial sequence
  Synthetic sequence
  misc_feature (6)..(12): N can be any nucleotide, and the Ns at these positions can be present or absent such that a total number of 4 to 7 Ns can be present.
gttaannnnnnngttaa

SEQ ID NO: 504 - DNA, 63 bp, Artificial sequence
  Synthetic sequence
  misc_feature (6)..(59): N can be any nucleotide, and the Ns at these positions can be present or absent such that a total number of 48 to 54 Ns can be present.
gttaannnnnnnnnnnnnnnnnnnnnnnnnnnnnnnnnnnnnnnnnnnnnnnnnnnnnntttg

SEQ ID NO: 505 - DNA, 45 bp, Artificial sequence
  Synthetic sequence
  misc_feature (6)..(43): N can be any nucleotide, and the Ns at these positions can be present or absent such that a total number of 36 to 38 Ns can be present
gttaannnnnnnnnnnnnnnnnnnnnnnnnnnnnnnnnnnnnnta

SEQ ID NO: 506 - DNA, 51 bp, Artificial sequence
  Synthetic sequence
  misc_feature (6)..(47): N can be any nucleotide, and the Ns at these positions can be present or absent such that a total number of 40 to 42 Ns can be present
gttaannnnnnnnnnnnnnnnnnnnnnnnnnnnnnnnnnnnnnnnnntttg

SEQ ID NO: 507 - DNA, 57 bp, Artificial sequence
  Synthetic sequence
  misc_feature (6)..(12): N can be any nucleotide, and the Ns at these positions can be present or absent such that a total number of 3 to 7 Ns can be present
  misc_feature (18)..(55): N can be any nucleotide, and the Ns at these positions can be present or absent such that a total number of 36 to 38 Ns can be present
gttaannnnnnngttaannnnnnnnnnnnnnnnnnnnnnnnnnnnnnnnnnnnnnta

SEQ ID NO: 508 - DNA, 63 bp, Artificial sequence
  Synthetic sequence
  misc_feature (6)..(12): N can be any nucleotide, and the Ns at these positions can be present or absent such that a total number of 3 to 7 Ns can be present
  misc_feature (18)..(59): N can be any nucleotide, and the Ns at these positions can be present or absent such that a total number of 40 to 42 Ns can be present
gttaannnnnnngttaannnnnnnnnnnnnnnnnnnnnnnnnnnnnnnnnnnnnnnnnntttg

SEQ ID NO: 509 - DNA, 63 bp, Artificial sequence
  Synthetic sequence
  misc_feature (6)..(55): N can be any nucleotide, and the Ns at these positions can be present or absent such that a total number of 44 to 50 Ns can be present
  misc_feature (58)..(59): n is any nucleotide
gttaannnnnnnnnnnnnnnnnnnnnnnnnnnnnnnnnnnnnnnnnnnnnnnnnntanntttg

SEQ ID NO: 510 - DNA, 51 bp, Artificial sequence
  Synthetic sequence
  misc_feature (6)..(43): N can be any nucleotide, and the Ns at these positions can be present or absent such that a total number of 36 to 38 Ns can be present
  misc_feature (46)..(47): n is any nucleotide
gttaannnnnnnnnnnnnnnnnnnnnnnnnnnnnnnnnnnnnntanntttg

SEQ ID NO: 511 - DNA, 515 bp, Artificial sequence
  Synthetic sequence
ggctacttttgcacccgctttccaagagaagaaagccttgataaattgacttagtgtaaaagcaagtgtctgcttaaccataagaacaaaaaaacttccgataaagtttggaagataaagctaaaagttcttatctttgcagtccgattcgcaaagaaaaggtgttacgcttttcttctttaccttctttccctttcgctaagagagcctgaaaaacgatagaaaaagaaaaacgaaaaaaaaacttccgaaaatatttggtagttaaaataaaacctcttacctttgcacccgcttttaaaacgaaagcaagatgttctttgaaatattgataaacaatacaagtagtacaagaaaaaaatagaaccgtcaatacttgtcttatatgtagtaatatgtatgagtcataaggtattaatgaagtcaataaattgtacggcatcctgaacagagcaaaaatcagctttatgctgactaacaatacttttacaatgaagagtttgatcctggctcag

1. A nucleic acid, comprising:
(a) a promoter operable in a prokaryotic cell, wherein the promoter comprises a nucleotide sequence comprising one or more of the following:
(i) 80% or more sequence identity of defined nucleotides of the nucleotide sequence: GTTAA (n)₄₋₇ GTTAA (n)₃₄₋₃₈ TA (n)₂ TTG,
(ii) 80% or more sequence identity with a sequence set forth in any of SEQ ID NOs: 388 and 407,
(iii) a nucleotide sequence comprising GTTAA (n)₄₋₇ GTTAA,
(iv) a nucleotide sequence comprising GTTAA (n)₄₄₋₅₀ TA,
(v) a nucleotide sequence comprising GTTAA (n)₄₅₋₅₄ TTTG,
(vi) a nucleotide sequence comprising GTTAA (n)₃₆₋₃₈ TA,
(vii) a nucleotide sequence comprising GTTAA (n)₄₀₋₄₂ TTTG,
(viii) a nucleotide sequence comprising GTTAA (n)₃₋₇ GTAA (n)₃₆₋₃₈ TA,
(ix) a nucleotide sequence comprising GTTAA (n)₃₋₇ GTTAA (n)₄₀₋₄₂ TTTG,
(x) a nucleotide sequence comprising GTTAA (n)₄₄₋₅₀ TA (n)₂ TTTG,
(xi) a nucleotide sequence comprising GTTAA (n)₃₆₋₃₈ TA (n)₂ TTTG,
(xii) a nucleotide sequence comprising GTTAA (n)₀₋₂₀ GTTAA (n)₁₀₋₆₀ TA (n)₀₋₁₀ TTTG,
(xiii) a nucleotide sequence comprising TTAA (n)₀₋₁₀ TTAA (n)₃₀₋₅₀ TA (n)₂ TTTG,
(xiv) a nucleotide sequence comprising GTTAA (n)₄₋₇ GTTAA (n)₃₋₃₉ TA (n)₂ TTTGC,
(xv) a nucleotide sequence comprising GTTAA (n)₄₋₇ GTTAA (n)₃₆₋₃₉ TA (n)₂ TTTG,
(xvi) a nucleotide sequence comprising GTTAA (n)₄₋₇ GTTAA (n)₃₄₋₃₈ TA (n)₂ TTTG,
(xvii) a nucleotide sequence comprising GTTAA (n)₄₋₇ GTTAA (n)₃₆₋₃₈ TA (n)₂ TTTG,
(xviii) a nucleotide sequence comprising GTTAA (n)₃₋₇ GTTAA (n)₃₆₋₃₈ TA (n)₂ TTTG,
(xix) a nucleotide sequence comprising GTTAA (n)₄₋₇ GTAA (n)₁₂₋₁₆ TTG (n)₁₈₋₂₂ TA (n)₂ TTTGC,
(xx) a nucleotide sequence comprising GTTAA (n)₃₋₇ GTTAA (n)₁₂₋₁₆ TTG (n)₁₈₋₂₂ TA (n)₂ TTTG,
(xxi) a nucleotide sequence comprising GTTAA (n)₄₋₈ GTAA (n)₁₂₋₁₆ TTG (n)₁₈₋₂₂ TA (n)₂ TTTG, and
(xxii) a nucleotide sequence comprising GTAA (n)₄₋₇ GTAA (n)₁₂₋₁₆ TTG (n)₁₈₋₂₂ TA (n)₂ TTTG, wherein each n is independently selected from A, C, G, and T; and
(b) a nucleotide sequence of interest that is operably linked to the promoter, wherein the nucleotide sequence of interest and the promoter are not found operably linked in nature.

2. The nucleic acid of claim 1, wherein the prokaryotic cell is a Bacteroides cell.

3. A nucleic acid, comprising:
(a) a promoter operable in a Bacteroides cell, and
(b) a nucleotide sequence of interest that is operably linked to the promoter, wherein the nucleotide sequence of interest and the promoter are not found operably linked in nature,
wherein the promoter provides one or more of the following when the nucleic acid is expressed in the Bacteroides cell:
(i) an increase in mRNA production of at least 30% relative to a native Bacteroides promoter,
(ii) an increase in fluorescence of at least 2000% relative to autofluorescence, wherein the nucleotide sequence of interest encodes super-folding GFP, or
(iii) a cytoplasmic protein concentration of at least 1.5 μM, wherein the nucleotide sequence of interest encodes the protein.

4. The nucleic acid of claim 3, wherein the native Bacteroides promoter is a native Bacteroides rRNA promoter.

5. The nucleic acid of claim 3, wherein the increase in mRNA production is at least 50%.

6. The nucleic acid of claim 3, wherein the increase in fluorescence is at least 5000%.

7. (canceled)

8. The nucleic acid of claim 3, wherein the cytoplasmic protein concentration is at least 2 μM.

9-10. (canceled)

11. The nucleic acid of claim 3, wherein the protein is luciferase.

12. The nucleic acid of claim 1, wherein the promoter is a phage promoter or a functional fragment thereof.

13. The nucleic acid of claim 12, wherein the phage is ϕB124-14.

14. The nucleic acid of claim 1, wherein the promoter is a non-naturally occurring promoter.

15. The nucleic acid of claim 1, wherein the promoter comprises a nucleotide sequence having 80% or more sequence identity with the nucleotide sequence: GTTAA (n)₃₋₇ GTTAA (n)₃₆₋₃₈ TA (n)₂ TTTG (SEQ ID NO: 400).

16. The nucleic acid of claim 1, wherein the promoter comprises the nucleotide sequence set forth in any of SEQ ID NOs: 381-388.

17. The nucleic acid of claim 1, wherein the nucleotide sequence of interest comprises a transgene sequence that encodes a protein.

18-20. (canceled)

21. A prokaryotic cell comprising the nucleic acid of claim 1.

22. The prokaryotic cell of claim 21, wherein the nucleic acid is integrated into a chromosome of the prokaryotic cell.

23. The prokaryotic cell of claim 21, wherein the prokaryotic cell is a Bacteroides cell.

24. (canceled)

25. The prokaryotic cell of claim 21, wherein the prokaryotic cell is an E. coli cell.

26. A method of expressing a nucleic acid in a prokaryotic cell, the method comprising: introducing the nucleic acid of claim 1 into the prokaryotic cell.

27-30. (canceled)

31. A fusion protein comprising: a secreted Bacteroides polypeptide fused to a heterologous polypeptide of interest.

32. The fusion protein of claim 31, wherein the secreted Bacteroides polypeptide comprises an amino acid sequence that has 80% or more sequence identity with an amino acid sequence set forth in any of SEQ ID NOs: 458-484.

33-49. (canceled)

50. A method of delivering a protein to an individual's gut, the method comprising: introducing, into an individual's gut, a Bacteroides cell comprising the nucleic acid of claim 1.

51-55. (canceled)
